(19) United States
(12) Patent Application Publication
(10) Pub. No.: US 2023/0242939 A1
(43) Pub. Date: Aug. 3, 2023

(54) METHODS AND SYSTEMS FOR PRODUCING AAV PARTICLES

(71) Applicant: Voyager Therapeutics, Inc., Cambridge, MA (US)

(72) Inventors: Krishanu Mathur, Cambridge, MA (US); Andrade Hendricks, Cambridge, MA (US); Matthew Luther, Cambridge, MA (US); Jacob J. Cardinal, North Cambridge, MA (US); Daniel S. Hurwit, Seattle, WA (US); Lori B. Karpes, Ashland, MA (US); Christopher J. Morrison, Arlington, MA (US)

(21) Appl. No.: 17/795,250

(22) PCT Filed: Jan. 28, 2021
(86) PCT No.: PCT/US2021/015393

§ 371 Date: Jul. 26, 2022

Related U.S. Application Data
(60) Provisional application No. 62/967,538, filed on Jan. 29, 2020.
(60) Provisional application No. 62/967,540, filed on Jan. 29, 2020.
(60) Provisional application No. 63/010,420, filed on Apr. 15, 2020.
(60) Provisional application No. 63/010,434, filed on Apr. 15, 2020.

(51) Int. Cl. C12N 15/86; C12N 9/88

(52) U.S. Cl. CPC C12N 15/86; C12N 9/88; C12Y 401/01028; C12N 2710/14144; C12N 2750/14143; C12N 2750/14151

(57) ABSTRACT

The present disclosure describes methods and systems for use in the production of recombinant adeno-associated virus (rAAV) particles comprising a payload (e.g., a polynucleotide encoding aromatic L-amino acid decarboxylase (AADC) or a functional variant thereof). In certain embodiments, the production process uses Sf9 insect cells as viral production cells. In certain embodiments, the production process and system use Baculoviral Expression Vectors (BEVs) and/or Baculoviral Infected Insect Cells (BIICs) in the production of rAAV particles.

### CROSS REFERENCE TO RELATED APPLICATIONS

[0001] This application is a U.S. National Stage Application filed under 35 U.S.C. § 371, based on International Patent Application No. PCT/US2021/015393, filed on Jan. 28, 2021, which claims priority to U.S. Provisional Patent Application Nos. 62/967,538, filed on Jan. 29, 2020; 62/967,540, filed on Jan. 29, 2020; 63/010,420, filed on Apr. 15, 2020; and 63/010,434, filed on Apr. 15, 2020, the entire contents of each of the above applications are incorporated herein by reference.

### REFERENCE TO THE SEQUENCE LISTING

[0002] The instant application contains a Sequence Listing which has been submitted electronically in ASCII format and is hereby incorporated by reference in its entirety. Said ASCII copy, created on Jan. 9, 2023, is named 135333-02703_ST25 and is 6,600,291 bytes in size.

### FIELD OF THE DISCLOSURE

[0003] The present disclosure describes methods and systems for use in the production of adeno-associated virus (AAV) particles, compositions and formulations, comprising recombinant adeno-associated viruses (rAAV), wherein the AAV particles comprise a payload construct encoding aromatic L-amino acid decarboxylase (AADC). In certain embodiments, the present disclosure presents methods and systems for designing, producing, clarifying, purifying, formulating, filtering and processing rAAVs and rAAV formulations. In certain embodiments, the production process and system use Spodoptera frugiperda insect cells (such as Sf9 or Sf21) as viral production cells (VPCs). In certain embodiments, the production process and system use Baculoviral Expression Vectors (BEVs) and/or Baculoviral Infected Insect Cells (BIICs) in the production of rAAVs.

### BACKGROUND

[0004] AAVs have emerged as one of the most widely studied and utilized viral vectors for gene transfer to mammalian cells. See, e.g., Tratschin et al., Mol. Cell Biol., 5(11):3251-3260 (1985) and Grimm et al., Hum. Gene Ther., 10(15):2445-2450 (1999), the contents of which are each incorporated herein by reference in their entireties insofar as they do not conflict with the present disclosure. Adeno-associated viral (AAV) vectors are promising candidates for therapeutic gene delivery and have proven safe and efficacious in clinical trials. The design and production of improved AAV particles for this purpose is an active field of study.

[0005] There remains a need for improved systems and methods for producing AAV capsid proteins, AAV capsids, and corresponding AAV vectors (such as AAV particles), e.g., for gene therapy.

[0006] For example, there remains a need for improved systems and methods for producing AAV capsid proteins, AAV capsids, and corresponding AAV vectors (such as AAV particles) for the delivery and/or expression of aromatic L-amino acid decarboxylase (AADC) in a patient and for treatment and/or prevention of Parkinson's Disease (PD).

[0007] AADC is a homodimeric pyridoxal phosphate-dependent enzyme responsible for the synthesis of dopamine and serotonin. The enzyme catalyzes the decarboxylation of L-3,4-dihydroxyphenylalanine (L-DOPA or levodopa) to dopamine; L-5-hydroxytryptophan to serotonin; and L-tryptophan to tryptamine. Defects in this gene are the cause of aromatic L-amino-acid decarboxylase deficiency (AADCD), which is an inborn error in neurotransmitter metabolism leading to combined serotonin and catecholamine deficiency that results in severe motor and autonomic dysfunctions.

[0008] PD is a progressive neurodegenerative disease of the central nervous system (CNS) producing sensory and motor symptoms. Dopamine replacement (i.e., levodopa) has been the standard pharmacotherapy for motor impairment in PD. However, the benefit of dopamine therapy becomes less marked over time, due, in part, to the progressive death of dopamine-generating cells and corresponding loss of AADC activity. Furthermore, systemic administration of high-dose dopamine is complicated by side effects, such as fluctuations in motor performance, dyskinesias, and hallucinations, resulting from dopaminergic stimulation of the mesolimbic system. One strategy to restore dopaminergic function and minimize side effects is the use of gene therapy to deliver AADC directly to a targeted region of the CNS.

### SUMMARY

[0009] The present disclosure presents methods and systems for producing recombinant adeno-associated viruses (rAAVs).

[0010] In certain embodiments, the present disclosure encompasses a method for producing a recombinant adeno-associated virus (rAAV) comprising a polynucleotide encoding a payload (e.g., aromatic L-amino acid decarboxylase (AADC) or a functional variant thereof). In some embodiments, the method comprises the steps of culturing viral production cells (VPCs) in a bioreactor to a target cell density; introducing into the bioreactor at least one baculovirus (expressionBac) comprising a viral expression construct, and at least one baculovirus (payloadBac) comprising a payload construct, wherein the viral expression construct comprises an adeno-associated virus (AAV) viral expression construct; incubating the VPCs in the bioreactor under conditions that result in the production of one or more rAAVs within one or more VPCs, wherein one or more of the rAAVs comprise the polynucleotide encoding AADC or a functional variant thereof; harvesting a viral production pool from the bioreactor, wherein the viral production pool comprises one or more VPCs comprising one or more rAAVs; lysing the one or more VPCs in the viral production pool, thereby releasing one or more rAAVs from the one or more VPCs into a lysis medium; and processing the lysis medium. In some embodiments, the processing step comprises one or more clarifying steps; one or more immunoaffinity chromatography steps; one or more anion exchange chromatography steps; one or more tangential flow filtration (TFF) steps, wherein the one or more TFF steps comprises ultrafiltration followed by diafiltration; and one or more virus retentive filtration (VRF) steps, wherein the processing may further comprise one or more filtration steps before or after any one or more of the processing steps described above. In certain embodiments, the VPCs are insect cells, e.g., Sf9 cells. In some embodiments, the payload is AADC or a functional variant thereof. In some embodiments, the payload construct comprises the polynucleotide encoding AADC or a functional variant thereof. In some embodiments, the polynucleotide encoding AADC or a functional variant thereof encodes SEQ ID NO: 978. In some embodiments, the payload construct comprises SEQ ID NO: 979.

[0011] In certain embodiments, the payload construct comprises the polynucleotide encoding a therapeutic protein, an enzyme, an antibody or antigen-binding fragment thereof, a protein ligand, or a soluble receptor. In certain embodiments, the payload construct comprises the polynucleotide encoding a modulatory polynucleotide which interferes with a target gene expression and/or a target protein production. In certain embodiments, the modulatory polynucleotide is an antisense strand, a miRNA molecule, or a siRNA molecule.

[0012] In some embodiments, the at least one baculovirus (expressionBac) comprising a viral expression construct is comprised in at least one baculovirus infected insect cell (expressionBIIC). In some embodiments, the baculovirus infected insect cell (expressionBIIC) comprising at least one expressionBac is an Sf9 cell. In some embodiments, the at least one baculovirus (payloadBac) comprising a payload construct is comprised in at least one baculovirus infected insect cell (payloadBIIC). In some embodiments, the baculovirus infected insect cell (payloadBIIC) comprising at least one payloadBac is an Sf9 cell.

[0013] In certain embodiments, the present disclosure encompasses a method for producing a recombinant adeno-associated virus (rAAV) comprising a polynucleotide encoding a payload (e.g., aromatic L-amino acid decarboxylase (AADC) or a functional variant thereof). In some embodiments, the method comprises the steps of: (a) culturing viral production cells (VPCs) in a bioreactor to a target cell density; (b) introducing into the bioreactor at least one baculovirus (expressionBac) comprising a viral expression construct, and at least one baculovirus (payloadBac) comprising a payload construct, wherein the viral expression construct comprises an adeno-associated virus (AAV) viral expression construct; (c) incubating the VPCs in the bioreactor under conditions that result in the production of one or more rAAVs within one or more VPCs, wherein one or more of the rAAVs comprise the polynucleotide encoding AADC or a functional variant thereof; (d) harvesting a viral production pool from the bioreactor, wherein the viral production pool comprises one or more VPCs comprising one or more rAAVs; (e) lysing the one or more VPCs in the viral production pool by chemical lysis, thereby releasing one or more rAAVs from the one or more VPCs into a lysis medium; (f) clarifying the lysis medium of (e) through one or more clarifying steps, yielding a clarification pool, wherein the clarification pool is optionally filtered; (g) processing the clarification pool of (f) through one or more immunoaffinity chromatography steps, yielding an immunoaffinity chromatography pool, wherein the one or more immunoaffinity chromatography steps optionally comprises neutralizing the immunoaffinity chromatography pool, and wherein the immunoaffinity chromatography pool is optionally filtered; (h) processing the immunoaffinity chromatography pool of (g) through one or more anion exchange chromatography steps, yielding an anion exchange chromatography pool, wherein the anion exchange chromatography pool is optionally filtered; (i) processing the anion exchange chromatography pool of (h) through one or more tangential flow filtration (TFF) steps, wherein the one or more TFF steps comprises ultrafiltration followed by diafiltration, wherein the one or more TFF steps yields a concentrated, buffer-exchanged pool, wherein the concentrated, buffer-exchanged pool is optionally filtered; and (j) processing the concentrated, buffer-exchanged pool of (i) through one or more virus retentive filtration (VRF) steps, yielding a viral filtration pool comprising rAAVs comprising a payload (e.g., polynucleotide encoding AADC or a functional variant thereof), wherein the viral filtration pool is optionally filtered. In some embodiments, the viral filtration pool of step (j) is further processed through a filtration step. In certain embodiments, the VPCs are insect cells. In some embodiments, the insect cells are Sf9 cells. In some embodiments, the payload is AADC or a functional variant thereof. In some embodiments, the payload construct comprises the polynucleotide encoding AADC or a functional variant thereof. In some embodiments, the polynucleotide encoding AADC or a functional variant thereof encodes SEQ ID NO: 978.

[0014] In some embodiments, the at least one baculovirus (expressionBac) comprising a viral expression construct is comprised in at least one baculovirus infected insect cell (expressionBIIC). In some embodiments, the baculovirus infected insect cell (expressionBIIC) comprising at least one expressionBac is an Sf9 cell. In some embodiments, the at least one baculovirus (payloadBac) comprising a payload construct is comprised in at least one baculovirus infected insect cell (payloadBIIC). In some embodiments, the baculovirus infected insect cell (payloadBIIC) comprising at least one payloadBac is an Sf9 cell.

[0015] In some embodiments, the payload construct comprises a 5′ inverted terminal repeat (ITR), at least one multiple cloning site (MCS) region, a cytomegalovirus (CMV) enhancer, a CMV promoter, an intron region comprising immediate-early 1 (Ie1) exon 1, Ie1 intron 1 (partial), human beta-globin (hBglobin) intron 2, and hBglobin intron 3, a polyadenylation (poly(A)) signal, and a 3′ ITR. In some embodiments, the payload construct comprises, e.g., in order from 5′ to 3′: a 5′ ITR comprising SEQ ID NO: 980, a first MCS region comprising SEQ ID NO: 981, a CMV enhancer comprising SEQ ID NO: 982, a CMV promoter comprising SEQ ID NO: 983, an intron region comprising an Ie1 exon 1 (SEQ ID NO: 984), a partial Ie1 intron 1 (SEQ ID NO: 985), a human beta-globin (hBglobin) intron 2 (SEQ ID NO: 986), and a hBglobin intron 3 (SEQ ID NO: 987), a polynucleotide encoding an AADC amino acid sequence comprising SEQ ID NO: 978, wherein optionally the polynucleotide comprises SEQ ID NO: 988, a poly(A) signal comprising SEQ ID NO: 990, and a 3′ ITR comprising SEQ ID NO: 991. In some embodiments, the payload construct comprises a sequence at least 90%, at least 95%, at least 96%, at least 97%, at least 98%, or at least 99% identical to SEQ ID NO: 979. In some embodiments, the payload construct comprises SEQ ID NO: 979.

[0016] In some embodiments, the at least one expressionBIIC is introduced into the bioreactor at a ratio of 1:200,000 to 1:400,000 (v/v) relative to VPCs) and/or the at least one payloadBIIC is introduced into the bioreactor at a ratio of 1:25,000 to 1:200,000 payloadBIIC:VPC (v/v). In some embodiments, the at least one expressionBIIC is introduced into the bioreactor at a ratio of 1:250,000 to 1:350,000 (v/v) relative to VPCs (e.g., 1:300,000 expressionBIIC:VPC (v/v)) and/or the at least one payloadBIIC is introduced into the bioreactor at a ratio of 1:50,000 to 1:150,000 payloadBIIC:VPC (v/v) (e.g., 1:100,000 payloadBIIC:VPC (v/v)). In some embodiments, the ratio of expressionBIIC to payloadBIIC is between 1:1 to 1:5. In some embodiments, the ratio of expressionBIIC to payloadBIIC is 1:3. In some embodiments, the at least one expressionBIIC is introduced into the bioreactor at a ratio of 1:300,000 expressionBIIC:VPC (v/v)) and the at least one payloadBIIC is introduced into the bioreactor at a ratio of 1:100,000 payloadBIIC:VPC (v/v)).

[0017] In some embodiments, the VPCs are cultured in the bioreactor in insect cell culture medium. In some embodiments, the insect cell culture medium is a serum free, protein-free medium, wherein optionally the insect cell culture medium comprises L-glutamine and poloxamer 188, wherein further optionally the insect cell culture medium comprises EFS AF™ insect cell culture medium.

[0018] In some embodiments, the VPCs are cultured in the bioreactor at 26° C.-28° C. (e.g., 27° C.) and 30%-50% (e.g., 40%) dissolved oxygen.

[0019] In some embodiments, the target cell density of the VPCs (i.e., the viable cell density (VCD)) is 3.0×10⁶-3.4×10⁶ cells/mL (e.g., 3.2×10⁶-3.4×10⁶ cells/mL; e.g., 3.2×10⁶ cells/mL).

[0020] In some embodiments, the target cell density (i.e., viable cell density (VCD)) of VPCs prior to introduction of the expressionBIICs (or expressionBacs) and payloadBIICs (or payloadBacs) is about 3.0×10⁶-3.4×10⁶ cells/mL (e.g., 3.2×10⁶-3.4×10⁶ cells/mL; e.g., 3.2×10⁶ cells/mL), the at least one expressionBIIC is introduced into the bioreactor at a ratio of 1:300,000 expressionBIIC:VPC (v/v)), and the at least one payloadBIIC is introduced into the bioreactor at a ratio of 1:100,000 payloadBIIC:VPC (v/v)). In some embodiments, one or more of the VPCs, expressionBIICs, and/or payloadBIICs are Sf9 cells. In some embodiments, all of the VPCs, expressionBIICs, and payloadBIICs are Sf9 cells.

[0021] In some embodiments, the lysing step comprises a chemical lysis solution comprising a surfactant and arginine or a salt thereof, wherein optionally the surfactant is octyl phenol ethoxylate and the arginine or salt thereof is arginine hydrochloride. In some embodiments, the chemical lysis solution comprises between about 0.1-1.0% (w/v) octyl phenol ethoxylate (e.g., Triton X-100) and between about 150-250 mM arginine hydrochloride. In some embodiments, the chemical lysis solution comprises 0.5% (w/v) octyl phenol ethoxylate (e.g., Triton X-100) and 200 mM arginine hydrochloride. In some embodiments, the lysis pH is 6.8-7.5. In some embodiments, the chemical lysis solution is free of detectable nuclease. In some embodiments, the lysing is carried out for 4-6 hours (e.g., 4 hours) at 26° C.-28° C. (e.g., 27° C.). In some embodiments, the one or more clarifying steps comprises depth filtration followed by filtration through an about 0.2 μm filter.

[0022] In some embodiments, the one or more immunoaffinity chromatography steps comprises an immunoaffinity chromatography column comprising a recombinant protein ligand that binds at least one of AAV1, AAV2, AAV3, AAV5, and AAV9. In some embodiments, the one or more immunoaffinity chromatography steps comprises an immunoaffinity chromatography column comprising a recombinant protein ligand that binds at least AAV2.

[0023] In some embodiments, the immunoaffinity chromatography column is equilibrated with a solution comprising between about 25-75 mM sodium phosphate, between about 325-375 mM sodium chloride and between about 0.001-0.01% w/v poloxamer 188 (solution pH of 7.2-7.6); flushed with a solution comprising between about 25-75 mM sodium phosphate, between about 325-375 mM sodium chloride and between about 0.001-0.1% w/v poloxamer 188 (solution pH of 7.2-7.6); washed with a solution comprising between about 15-25 mM sodium citrate, between about 0.5-1.5 M sodium chloride, and between about 0.001-0.1% w/v poloxamer 188 (solution pH of 5.8-6.2); and washed a second time with a solution of between about 5-15 mM sodium citrate, between about 325-375 mM sodium chloride and between about 0.001-0.1% w/v poloxamer 188 (solution pH of 5.8-6.2); wherein the one or more immunoaffinity chromatography steps yields a immunoaffinity chromatography pool. In some embodiments, the filtered product is eluted with a solution comprising between about 15-25 mM sodium citrate, between about 325-375 mM sodium chloride and between about 0.001-0.1% w/v poloxamer 188 (solution pH of 2.8-3.2). In some embodiments, the immunoaffinity chromatography pool is neutralized with between about 1.5-2.5 M Tris Base and between about 0.001-0.01% w/v poloxamer 188 (2.0-4.0% v/v spike, pH 8.0-8.5). In some embodiments, the immunoaffinity chromatography pool is filtered through an about 0.2 μm filter.

[0024] In some embodiments, the immunoaffinity chromatography column is equilibrated with a solution comprising 50 mM sodium phosphate, 350 mM sodium chloride and 0.001% w/v poloxamer 188 (e.g., solution pH of 7.2-7.6, e.g., pH of 7.4); flushed with a solution comprising 50 mM sodium phosphate, 350 mM sodium chloride and 0.001% w/v poloxamer 188 (e.g., solution pH of 7.2-7.6, e.g., pH of 7.4); washed with a solution comprising 20 mM sodium citrate, 1 M sodium chloride and 0.001% w/v poloxamer 188 (e.g., solution pH of 5.8-6.2, e.g., pH of 6.0); and washed a second time with a solution of 10 mM sodium citrate, 350 mM sodium chloride and 0.001% w/v poloxamer 188 (e.g., solution pH of 5.8-6.2, e.g., pH of 6.0); wherein the one or more immunoaffinity chromatography steps yields a immunoaffinity chromatography pool. In some embodiments, the filtered product is eluted with a solution comprising 20 mM sodium citrate, 350 mM sodium chloride and 0.001% w/v poloxamer 188 (e.g., solution pH of 2.8-3.2, e.g., pH of 3.0). In some embodiments, the immunoaffinity chromatography pool is neutralized with 2 M Tris Base and 0.001% w/v poloxamer 188 (3.0% v/v spike, pH 8.0-8.5). In some embodiments, the immunoaffinity chromatography pool is filtered through an about 0.2 μm filter.

[0025] In some embodiments, the one or more immunoaffinity chromatography steps comprises loading the immunoaffinity chromatography column with a 1.0×10¹³-5.0×10¹³ vg/mL-r load challenge at 18-25° C.

[0026] In some embodiments, the one or more anion exchange chromatography steps comprises charging and equilibrating an anion exchange chromatography column with a solution comprising between about 15-25 mM Tris, between about 1.5-2.5 M sodium chloride and between about 0.001-0.01% w/v poloxamer 188, then a solution of between about 35-45 mM Tris, between about 150-190 mM sodium chloride and between about 0.001-0.01% w/v poloxamer 188 (solution pH of 7.8-8.2). In some embodiments, the anion exchange chromatography column is flushed and eluted with a solution comprising between about 35-45 mM Tris, between about 150-190 mM sodium chloride and between about 0.001-0.01% w/v poloxamer 188 (solution pH of 8.3-8.7), yielding an anion exchange chromatography pool. In some embodiments, the anion exchange chromatography elution pool is filtered through an about 0.2 μm filter.

[0027] In some embodiments, the one or more anion exchange chromatography steps comprises charging and equilibrating an anion exchange chromatography column with a solution comprising 20 mM Tris, 2 M sodium chloride and 0.001% w/v poloxamer 188, then a solution of 40 mM Tris, 170 mM sodium chloride and 0.001% w/v poloxamer 188 (e.g., solution pH of 7.8-8.2, e.g., pH of 8.0). In some embodiments, the anion exchange chromatography column is flushed and eluted with a solution comprising 40 mM Tris, 170 mM sodium chloride and 0.001% w/v poloxamer 188 (e.g., solution pH of 8.3-8.7, e.g., pH of 8.5), yielding an anion exchange chromatography pool. In some embodiments, the anion exchange chromatography elution pool is filtered through an about 0.2 μm filter.

[0028] In some embodiments, the one or more anion exchange chromatography steps comprises loading the anion exchange chromatography column with a 1.0×10¹³-5.0×10¹³ vg/mL-r load challenge at 18-25° C.

[0029] In some embodiments, the one or more TFF steps comprises TFF filtration with a TFF filter, yielding a TFF load pool, followed by concentration of the TFF load pool by ultrafiltration followed by diafiltration, yielding a final TFF load pool. In some embodiments, the TFF filtration comprises equilibration with a buffer (pH 8.3-8.7) comprising between about 35-45 mM Tris, between about 150-190 mM sodium chloride, and between about 0.001-0.01% (w/v) poloxamer 188. In some embodiments, after obtaining the TFF load pool, the TFF filter is subjected to a recovery flush using a buffer comprising between about 5-15 mM sodium phosphate, between about 160-200 mM sodium chloride, and between about 0.001-0.1% (w/v) poloxamer 188, yielding a TFF recovery flush pool. In some embodiments, the TFF load pool is concentrated by ultrafiltration to a viral concentration of between about 1.0×10¹²-7.0×10¹² vg/mL. In some embodiments, the diafiltration step comprises buffer exchange with a buffer comprising between about 5-15 mM sodium phosphate, between about 160-200 mM sodium chloride, and between about 0.001-0.01% (w/v) poloxamer 188 (buffer pH of 7.1-7.5). In some embodiments, the final TFF load pool is filtered through an about 0.2 μm filter, yielding a filtered final TFF load pool.

[0030] In some embodiments, the TFF filtration comprises equilibration with a buffer (e.g., pH 8.3-8.7, e.g., pH 8.5) comprising 40 mM Tris, 170 mM sodium chloride, and 0.001% (w/v) poloxamer 188. In some embodiments, after obtaining the TFF load pool, the TFF filter is subjected to a recovery flush using a buffer comprising 10 mM sodium phosphate, 180 mM sodium chloride, and 0.001% (w/v) poloxamer 188, yielding a TFF recovery flush pool. In some embodiments, the TFF load pool is concentrated by ultrafiltration to a viral concentration of about 5.0×10¹² vg/mL. In some embodiments, the diafiltration step comprises buffer exchange with a buffer comprising 10 mM sodium phosphate, 180 mM sodium chloride, and 0.001% (w/v) poloxamer 188 (buffer pH of 7.1-7.5, e.g., pH 7.3).

[0031] In some embodiments, the final TFF load pool is filtered through an about 0.2 μm filter, yielding a filtered final TFF load pool. In some embodiments, the TFF recovery flush pool is filtered through an about 0.2 μm filter, yielding a filtered TFF recovery flush pool. In some embodiments, the filtered final TFF load pool and the filtered TFF recovery flush pool are combined to form a concentrated, buffer-exchanged pool, wherein the concentrated, buffer-exchanged pool is optionally diluted using a buffer comprising 10 mM sodium phosphate, 180 mM sodium chloride, and 0.001% (w/v) poloxamer 188 (buffer pH of 7.1-7.5, e.g., pH 7.3), wherein the concentrated, buffer-exchanged pool comprises a viral concentration of 2.0×10¹²-6.0×10¹² vg/mL, e.g., 5.0×10¹² vg/mL. In some embodiments, the filtered final TFF load pool and the filtered TFF recovery flush pool are combined to form a concentrated, buffer-exchanged pool, wherein the concentrated, buffer-exchanged pool is optionally diluted using a buffer comprising between about 5-15 mM sodium phosphate, between about 160-200 mM sodium chloride, and between about 0.001-0.1% (w/v) poloxamer 188 (buffer pH of 7.1-7.5), wherein the concentrated, buffer-exchanged pool comprises a viral concentration of 1.0×10¹²-7.0×10¹² vg/mL.

[0032] In some embodiments, the one or more VRF steps comprises filtration with a VRF filter having a pore size of about 35 nm, yielding a viral filtration pool. In some embodiments, the VRF filter is flushed twice before use with a solution comprising between about 5-15 mM sodium phosphate, between about 160-200 mM sodium chloride, and between about 0.001-0.01% poloxamer 188 (solution pH of 7.1-7.5). In some embodiments, the VRF filter is flushed twice before use with a solution comprising 10 mM sodium phosphate, 180 mM sodium chloride, and 0.001% poloxamer 188 (solution pH of 7.1-7.5, e.g., pH 7.3).

[0033] In some embodiments, the viral filtration pool is filtered through a filter of about 0.2 μm. In some embodiments, the viral filtration pool comprises a viral concentration of 1.0×10¹²-7.0×10¹² vg/mL. In some embodiments, the viral filtration pool is filtered at least once (optionally at least twice) using an about 0.22 μm filter, yielding a filtered drug substance pool in a solution comprising between about 5-15 mM sodium phosphate, between about 160-200 mM sodium chloride, and between about 0.001-0.01% poloxamer 188 (solution pH of 7.1-7.5). In some embodiments, the viral filtration pool comprises a viral concentration of 3.5×10¹²-5.0×10¹² vg/mL, e.g., about 5.0×10¹² vg/mL. In some embodiments, the viral filtration pool is filtered at least once (optionally at least twice) using an about 0.22 μm filter, yielding a filtered drug substance pool in a solution comprising 10 mM sodium phosphate, 180 mM sodium chloride, and 0.001% poloxamer 188 (solution pH of 7.1-7.5, e.g., pH 7.3).

[0034] In some embodiments, the filtered drug substance pool comprises a viral concentration of 3.0×10¹²-5.0×10¹² vg/mL, e.g., about 5.0×10¹² vg/mL. In some embodiments, the VRCs, at least one expressionBac or at least one expressionBIIC, and at least one payloadBac or at least one expressionBIIC are incubated for 156-180 hours, e.g., 164-172 hours, e.g., 168 hours, prior to lysis. In some embodiments, the VRCs incubating with at least one expressionBac (e.g., expressionBIIC) and at least one payloadBac (e.g., payloadBIIC) have at least 85% viability, e.g., at least 90% viability, prior to lysis. In some embodiments, the viral production pool weighs 195-198 kg, e.g., 196 kg, prior to lysis. In some embodiments, the method produces a total process rAAV yield of 30%-50%. In some embodiments, the rAAVs comprise a capsid from AAV2. In some embodiments, the AAV2 capsid is encoded by a sequence comprising SEQ ID NO: 15. In some embodiments, the AAV2 capsid is encoded by a sequence comprising SEQ ID NO: 1778. In some embodiments, the AAV2 capsid comprises SEQ ID NO: 16.

[0035] In some embodiments, the viral expression construct comprises one or more polynucleotides encoding a VP1 capsid protein, VP2 capsid protein, VP3 capsid protein, Rep52, and Rep78. In some embodiments, the VP1 capsid protein, VP2 capsid protein, and VP3 capsid protein are encoded in one or more open reading frames and the Rep52 and Rep78 are encoded in one or more open reading frames, wherein the one or more open reading frames encoding the VP1 capsid protein, VP2 capsid protein, and VP3 capsid protein and the one or more open reading frames encoding the Rep52 and Rep78 are different open reading frames. In some embodiments, the VP1 capsid protein, VP2 capsid protein, and VP3 capsid protein are encoded in a first open reading frame and the Rep52 and Rep78 are encoded in a second open reading frame. In some embodiments, the ratio of VP1:VP2:VP3 of the rAAV produced by a method disclosed herein is about 1:1:10.

[0036] In certain embodiments, a composition comprising rAAVs comprising a polynucleotide encoding AADC or a functional variant thereof is produced by any of the methods disclosed herein. In some embodiments, the composition comprises 3.0×10¹²-5.0×10¹² vg/mL rAAVs, e.g., about 5.0×10¹² vg/mL rAAVs, in a solution comprising 10 mM sodium phosphate, 180 mM sodium chloride, and 0.001% poloxamer 188 (solution pH of 7.1-7.5, e.g., pH 7.3). In some embodiments, the composition is used in treating and/or preventing Parkinson's Disease. In some embodiments, the present disclosure comprises a method of treating Parkinson's Disease comprising administering an effective amount of the composition. In some embodiments, the composition is used for the manufacture of a medicament for treating and/or preventing Parkinson's Disease.

[0037] In certain embodiments, the present disclosure encompasses a method for producing a recombinant adeno-associated virus 2 (rAAV2) comprising a polynucleotide comprising SEQ ID NO: 979. In some embodiments, the method comprises the steps of: (a) culturing Sf9 cells (“viral production Sf9 cells”) in a bioreactor to a target cell density of 3.0×10⁶-3.4×10⁶ cells/mL; wherein the viral production Sf9 cells are cultured in serum-free, protein-free insect cell culture medium at about 26° C.-28° C. and 30%-50% dissolved oxygen, wherein the serum-free, protein-free insect cell culture medium optionally comprises L-glutamine and poloxamer 188; (b) introducing into the bioreactor baculovirus infected insect cells (expressionBIICs) comprising baculoviruses comprising a viral expression construct, and baculovirus infected insect cells (payloadBIICs) comprising baculoviruses comprising a payload construct, wherein the viral expression construct comprises one or more polynucleotides encoding capsid and replication proteins of adeno-associated virus 2 (AAV2); wherein the payload construct comprises SEQ ID NO: 979; and wherein the expressionBIICs are introduced at a ratio of about 1:300,000 expressionBIIC:Sf9 (v/v) and the payloadBIICs are introduced at a ratio of about 1:100,000 payloadBIIC:Sf9 (v/v), wherein the viral expression construct comprises one or more polynucleotides encoding capsid and replication proteins of adeno-associated virus 2 (AAV2, e.g., wild-type AAV2); wherein the expressionBIICs are optionally Sf9 cells and the payloadBIICs are optionally Sf9 cells; (c) incubating the viral production Sf9 cells in the bioreactor under conditions that result in the production of one or more rAAV2s within one or more of the viral production Sf9 cells, wherein one or more of the rAAV2s comprise a polynucleotide comprising SEQ ID NO: 979; (d) harvesting a viral production pool from the bioreactor, wherein the viral production pool comprises one or more viral production Sf9 cells comprising one or more rAAV2s, wherein the viral production pool optionally weighs 195-198 kg, e.g., 196 kg, and has a % viability of at least 85%, e.g., at least 90%; (e) lysing the viral production Sf9 cells in the viral production pool, wherein the lysing comprises a chemical lysis solution and is carried out at 26° C.-28° C. for 4-6 hours, wherein the chemical lysis solution comprises 0.5% (w/v) octyl phenol ethoxylate and 200 mM arginine hydrochloride, and lacks detectable nuclease, thereby releasing one or more rAAV2s from the viral production Sf9 cells into a lysis medium; (f) clarifying the lysis medium of (e) through a depth filter followed by an about 0.2 μm filter, yielding a clarification pool; (g) processing the clarification pool of (f) through an immunoaffinity chromatography column comprising a recombinant protein ligand that binds at least AAV2; wherein the immunoaffinity chromatography column is equilibrated with a solution comprising 50 mM sodium phosphate, 350 mM sodium chloride and 0.001% w/v poloxamer 188; loaded with a 1.0×10¹³-5.0×10¹³ vg/mL-r load challenge at 18-25° C.; flushed with a solution comprising 50 mM sodium phosphate, 350 mM sodium chloride and 0.001% w/v poloxamer 188; washed with a solution comprising 20 mM sodium citrate, 1 M sodium chloride and 0.001% w/v poloxamer 188; and washed with a solution of 10 mM sodium citrate, 350 mM sodium chloride and 0.001% w/v poloxamer 188; wherein processing the clarification pool of (f) through an immunoaffinity chromatography column yields an immunoaffinity chromatography pool, wherein the immunoaffinity chromatography pool is optionally neutralized with 2 M Tris Base and 0.001% w/v poloxamer 188 (3.0% v/v spike, pH 8.0-8.5) and optionally filtered through an about 0.2 μm filter; (h) processing the immunoaffinity chromatography pool or filtered immunoaffinity chromatography pool of (g) through an anion exchange chromatography column, e.g., a column operated in flow-through mode; wherein the one or more anion exchange chromatography columns is charged and equilibrated with a solution comprising 20 mM Tris, 2 M sodium chloride and 0.001% w/v poloxamer 188, then a solution of 40 mM Tris, 170 mM sodium chloride and 0.001% w/v poloxamer 188; loaded with a 1.0×10¹³-5.0×10¹³ vg/mL-r load challenge at 18-25° C.; and flushed and eluted with a solution comprising 40 mM Tris, 170 mM sodium chloride and 0.001% w/v poloxamer 188, yielding an anion exchange chromatography pool; wherein the anion exchange chromatography pool is filtered through an about 0.2 μm filter, yielding a filtered anion exchange chromatography pool; (i) processing the filtered anion exchange chromatography pool of (h) through a tangential flow filtration (TFF) filter yielding a TFF load pool; wherein the TFF filter is equilibrated with buffer comprising 40 mM Tris, 170 mM sodium chloride, and 0.001% (w/v) poloxamer 188; wherein the TFF load pool is concentrated by ultrafiltration to a viral concentration of about 5.0×10¹² vg/mL, followed by diafiltration comprising buffer exchange with a buffer comprising 10 mM sodium phosphate, 180 mM sodium chloride, and 0.001% (w/v) poloxamer 188 (buffer pH of 7.1-7.5, e.g., pH 7.3), followed by filtration through an about 0.2 μm filter, yielding a filtered TFF load pool; wherein a TFF recovery flush pool is prepared by subjecting the TFF filter to a recovery flush using a buffer comprising 10 mM sodium phosphate, 180 mM sodium chloride, and 0.001% (w/v) poloxamer 188 (buffer pH of 7.1-7.5, e.g., pH 7.3); wherein the TFF recovery flush pool is filtered through an about 0.2 μm filter, yielding a filtered TFF recovery flush pool; wherein the filtered TFF load pool and filtered TFF recovery flush pool are combined to form a concentrated, buffer-exchanged pool, and optionally diluted using a buffer comprising 10 mM sodium phosphate, 180 mM sodium chloride, and 0.001% (w/v) poloxamer 188 (buffer pH of 7.1-7.5, e.g., pH 7.3), wherein the concentrated, buffer-exchanged pool comprises a viral concentration of 2.0×10¹²-6.0×10¹² vg/mL; (j) processing the concentrated, buffer-exchanged pool of (i) through a viral retentive filtration (VRF) filter to yield a viral filtration pool; wherein the VRF filter comprises a pore size of about 35 nm and is flushed twice before use with a solution comprising 10 mM sodium phosphate, 180 mM sodium chloride, and 0.001% poloxamer 188 (solution pH of 7.1-7.5, e.g., pH 7.3); and wherein the viral filtration pool is filtered through a filter of about 0.2 μm, yielding a filtered viral filtration pool comprising a viral concentration of 3.5×10¹²-5.0×10¹² vg/mL; and (k) processing the viral production pool of (j) through an about 0.22 μm filter, e.g., filtering twice through an about 0.22 μm filter, to yield a purified rAAV2 composition comprising a viral concentration of 3.0×10¹²-5.0×10¹² vg/mL in a solution comprising 10 mM sodium phosphate, 180 mM sodium chloride, and 0.001% poloxamer 188 (solution pH of 7.1-7.5, e.g., pH 7.3).

[0038] In some embodiments, the viral concentration of the purified rAAV2 composition is about 5.0×10¹² vg/mL. In some embodiments, the method produces a total process rAAV yield of 30%-50%. In some embodiments, the viral expression construct comprises one or more polynucleotides encoding a VP1 capsid protein, VP2 capsid protein, VP3 capsid protein, Rep52, and Rep78. In some embodiments, the VP1 capsid protein, VP2 capsid protein, and VP3 capsid protein are encoded in one or more open reading frames and the Rep52 and Rep78 are encoded in one or more open reading frames, wherein the one or more open reading frames encoding the VP1 capsid protein, VP2 capsid protein, and VP3 capsid protein and the one or more open reading frames encoding the Rep52 and Rep78 are different open reading frames. In some embodiments, the VP1 capsid protein, VP2 capsid protein, and VP3 capsid protein are encoded in a first open reading frame and the Rep52 and Rep78 are encoded in a second open reading frame. In some embodiments, the purified rAAV2 comprise a ratio of VP1:VP2:VP3 of about 1:1:10.

[0039] In some embodiments, a composition produced by any of the methods disclosed herein comprises 3.0×10¹²-5.0×10¹² vg/mL rAAV2s, e.g., about 5.0×10¹² vg/mL rAAV2s, in a solution comprising 10 mM sodium phosphate, 180 mM sodium chloride, and 0.001% poloxamer 188 (solution pH of 7.1-7.5, e.g., pH 7.3). In some embodiments, the composition is used in treating and/or preventing Parkinson's Disease. In some embodiments, a method of treating Parkinson's Disease comprises administering an effective amount of the composition. In some embodiments, the composition is used in the manufacture of a medicament for treating and/or preventing Parkinson's Disease.

[0040] In some embodiments, the purified viral rAAV2 composition is formulated at a concentration of 3.0×1013-5.0×1013 vg/mL, e.g., about 5×1013 vg/mL. In some embodiments, the purified rAAV2 composition is formulated a concentration of 2.0×1013-3.0×1013 vg/mL, e.g., about 2.7×1013 vg/mL. In some embodiments, the purified viral rAAV2 composition comprises a dose of about 7.5×1011 vg per vial. In some embodiments, the purified viral rAAV2 composition comprises a dose of about 1.5×1012 vg per vial. In some embodiments, the purified viral rAAV2 composition comprises a dose of about 4.7×1012 vg per vial. In some embodiments, the purified viral rAAV2 composition comprises a dose of about 3.6×1012 vg per vial. In some embodiments, the purified viral rAAV2 composition comprises a dose of about 9.4×1012 vg per vial.

### BRIEF DESCRIPTION OF THE FIGURES

[0041] The foregoing and other objects, features and advantages will be apparent from the following description of particular embodiments of the present disclosure, as illustrated in the accompanying figures. The figures are not necessarily to scale or comprehensive, with emphasis instead being placed upon illustrating the principles of various embodiments of the present disclosure.

[0042] FIG. 1 shows a schematic for one embodiment of a system, and a flow diagram for one embodiment of a process, for producing baculovirus infected insect cells (BIICs) using Viral Production Cells (VPC) and plasmid constructs.

[0043] FIG. 2 shows a schematic for one embodiment of a system, and a flow diagram for one embodiment of a process, for producing AAV Particles using Viral Production Cells (VPC) and baculovirus infected insect cells (BIICs) or with baculovirus.

[0044] FIG. 3 shows schematic for one embodiment of a system, and a flow diagram for one embodiment of a process, for producing a Drug Substance by processing, clarifying and purifying a bulk harvest of AAV particles and Viral Production Cells.

[0045] FIG. 4A and FIG. 4B show the results of computer modeling for VPC-to-expressionBIIC ratio (v/v) vs. payloadBIIC-to-expressionBIIC ratio (v/v) in BIIC transfection of viral production cells (VPC). FIG. 4A shows AAV titer (vg/mL) using ddPCR, and FIG. 4B shows Capsid Full %.

[0046] FIG. 5A and FIG. 5B show the results of computer modeling for VPC-to-expressionBIIC ratio (v/v) vs. target VPC cell density at infection (x10⁶ cells/mL) in BIIC transfection of viral production cells (VPC). FIG. 5A shows AAV titer (vg/mL) using ddPCR, and FIG. 5B shows Capsid Full %.

[0047] FIG. 6A and FIG. 6B show the results of computer modeling for payloadBIIC-to-expressionBIIC ratio (v/v) vs. target VPC cell density at infection (x10⁶ cells/mL) in BIIC transfection of viral production cells (VPC). FIG. 6A shows AAV titer (vg/mL) using ddPCR, and FIG. 6B shows Capsid Full %.

[0048] FIG. 7 shows an embodiment of an upstream process for producing rAAVs comprising a polynucleotide encoding AADC or a functional variant thereof.

[0049] FIG. 8A and FIG. 8B shows an embodiment of a downstream process for producing rAAVs comprising a polynucleotide encoding AADC or a functional variant thereof.

### DETAILED DESCRIPTION

### I. Adeno-Associated Viruses (AAVS)

### Overview

[0050] Adeno-associated viruses (AAV) are small non-enveloped icosahedral capsid viruses of the Parvoviridae family characterized by a single stranded DNA viral genome. Parvoviridae family viruses consist of two subfamilies: Parvovirinae, which infect vertebrates, and Densovirinae, which infect invertebrates. The Parvoviridae family comprises the Dependovirus genus which comprises AAV, capable of replication in vertebrate hosts comprising, but not limited to, human, primate, bovine, canine, equine, and ovine species.

[0051] The parvoviruses and other members of the Parvoviridae family are generally described in Kenneth I. Berns, “Parvoviridae: The Viruses and Their Replication,” Chapter 69 in Fields Virology (3d Ed. 1996), the content of which is incorporated herein by reference in its entirety as related to parvoviruses, insofar as it does not conflict with the present disclosure.

[0052] AAV have proven to be useful as a biological tool due to their relatively simple structure, their ability to infect a wide range of cells (comprising quiescent and dividing cells) without integration into the host genome and without replicating, and their relatively benign immunogenic profile. The genome of the virus may be manipulated to contain a minimum of components for the assembly of a functional recombinant virus, or viral particle, which is loaded with or engineered to target a particular tissue and express or deliver a desired payload.

### AAV Viral Genomes

[0053] The wild-type AAV viral genome is a linear, single-stranded DNA (ssDNA) molecule approximately 5,000 nucleotides (nt) in length. Inverted terminal repeats (ITRs) traditionally cap the viral genome at both the 5′ and the 3′ end, providing origins of replication for the viral genome. While not wishing to be bound by theory, an AAV viral genome typically comprises two ITR sequences. These ITRs have a characteristic T-shaped hairpin structure defined by a self-complementary region (145 nt in wild-type AAV) at the 5′ and 3′ ends of the ssDNA which form an energetically stable double stranded region. The double stranded hairpin structures comprise multiple functions comprising, but not limited to, acting as an origin for DNA replication by functioning as primers for the endogenous DNA polymerase complex of the host viral replication cell.

[0054] The wild-type AAV viral genome further comprises nucleotide sequences for two open reading frames, one for the four non-structural Rep proteins (Rep78, Rep68, Rep52, Rep40, encoded by Rep genes) and one for the three capsid, or structural, proteins (VP1, VP2, VP3, encoded by capsid genes or Cap genes). The Rep proteins are important for replication and packaging, while the capsid proteins are assembled to create the protein shell of the AAV, or AAV capsid. Alternative splicing and alternate initiation codons and promoters result in the generation of four different Rep proteins from a single open reading frame and the generation of three capsid proteins from a single open reading frame. Though it varies by AAV serotype, as a non-limiting example, for AAV9/hu.14 (SEQ ID NO: 123 of U.S. Pat. No. 7,906,111, the content of which is incorporated herein by reference in its entirety as related to AAV9/hu.14, insofar as it does not conflict with the present disclosure) VP1 refers to amino acids 1-736, VP2 refers to amino acids 138-736, and VP3 refers to amino acids 203-736. In other words, VP1 is the full-length capsid sequence, while VP2 and VP3 are shorter components of the whole. As a result, changes in the sequence in the VP3 region, are also changes to VP1 and VP2, however, the percent difference as compared to the parent sequence will be greatest for VP3 since it is the shortest sequence of the three. Though described here in relation to the amino acid sequence, the nucleic acid sequence encoding these proteins can be similarly described. Together, the three capsid proteins assemble to create the AAV capsid protein. While not wishing to be bound by theory, the AAV capsid protein typically comprises a molar ratio of 1:1:10 of VP1:VP2:VP3. As used herein, an “AAV serotype” is defined primarily by the AAV capsid. In some instances, the ITRs are also specifically described by the AAV serotype (e.g., AAV2/9).

[0055] For use as a biological tool, the wild-type AAV viral genome can be modified to replace the rep/cap sequences with a nucleic acid sequence comprising a payload region with at least one ITR region. Typically, in recombinant AAV viral genomes there are two ITR regions. The rep/cap sequences can be provided in trans during production to generate AAV particles.

[0056] In addition to the encoded heterologous payload, AAV vectors may comprise the viral genome, in whole or in part, of any naturally occurring and/or recombinant AAV serotype nucleotide sequence or variant. AAV variants may have sequences of significant homology at the nucleic acid (genome or capsid) and amino acid levels (capsids), to produce constructs which are generally physical and functional equivalents, replicate by similar mechanisms, and assemble by similar mechanisms. See Chiorini et al., J. Vir. 71: 6823-33(1997); Srivastava et al., J. Vir. 45:555-64 (1983); Chiorini et al., J. Vir. 73:1309-1319 (1999); Rutledge et al., J. Vir. 72:309-319 (1998); and Wu et al., J. Vir. 74: 8635-47 (2000), the contents of each of which are incorporated herein by reference in their entireties as related to AAV variants and equivalents, insofar as they do not conflict with the present disclosure.

[0057] In certain embodiments, AAV particles, viral genomes and/or payloads of the present disclosure, and the methods of their use, may be as described in WO2017189963, the content of which is incorporated herein by reference in its entirety as related to AAV particles, viral genomes and/or payloads, insofar as it does not conflict with the present disclosure.

[0058] AAV particles of the present disclosure may be formulated in any of the gene therapy formulations of the disclosure comprising any variations of such formulations apparent to those skilled in the art. The reference to “AAV particles,” “AAV particle formulations” and “formulated AAV particles” in the present application refers to the AAV particles which may be formulated and those which are formulated without limiting either.

[0059] In certain embodiments, AAV particles of the present disclosure are recombinant AAV (rAAV) viral particles which are replication defective, lacking sequences encoding functional Rep and Cap proteins within their viral genome. These defective AAV particles may lack most or all parental coding sequences and essentially carry only one or two AAV ITR sequences and the nucleic acid of interest (i.e. payload) for delivery to a cell, a tissue, an organ or an organism.

[0060] In certain embodiments, the viral genome of the AAV particles of the present disclosure comprises at least one control element which provides for the replication, transcription and translation of a coding sequence encoded therein. Not all of the control elements need always be present as long as the coding sequence is capable of being replicated, transcribed and/or translated in an appropriate host cell. Non-limiting examples of expression control elements comprise sequences for transcription initiation and/or termination, promoter and/or enhancer sequences, efficient RNA processing signals such as splicing and polyadenylation signals, sequences that stabilize cytoplasmic mRNA, sequences that enhance translation efficacy (e.g., Kozak consensus sequence), sequences that enhance protein stability, and/or sequences that enhance protein processing and/or secretion.

[0061] In certain embodiments, AAV particles for use in therapeutics and/or diagnostics comprise a virus that has been distilled or reduced to the minimum components necessary for transduction of a nucleic acid payload or cargo of interest. In this manner, AAV particles are engineered as vehicles for specific delivery while lacking the deleterious replication and/or integration features found in wild-type viruses.

[0062] AAV particles of the present disclosure may be produced recombinantly and may be based on adeno-associated virus (AAV) parent or reference sequences. As used herein, a “vector” is any molecule or moiety which transports, transduces or otherwise acts as a carrier of a heterologous molecule such as the nucleic acids described herein.

[0063] In addition to single stranded AAV viral genomes (e.g., ssAAVs), the present disclosure also provides for self-complementary AAV (scAAVs) viral genomes. scAAV vector genomes contain DNA strands which anneal together to form double stranded DNA. By skipping second strand synthesis, scAAVs allow for rapid expression in the cell.

[0064] In certain embodiments, the AAV viral genome of the present disclosure is a scAAV. In certain embodiments, the AAV viral genome of the present disclosure is a ssAAV.

[0065] AAV particles may be modified to enhance the efficiency of delivery. Such modified AAV particles can be packaged efficiently and be used to successfully infect the target cells at high frequency and with minimal toxicity. In certain embodiments the capsids of the AAV particles are engineered according to the methods described in US Publication Number US 20130195801, the content of which is incorporated herein by reference in its entirety as related to modifying AAV particles to enhance the efficiency of delivery, insofar as it does not conflict with the present disclosure.

[0066] In certain embodiments, the AAV particles comprise a payload construct and/or region encoding a polypeptide or protein of the present disclosure, and may be introduced into mammalian cells. In certain embodiments, the AAV particles comprise a payload construct and/or region encoding a polypeptide or protein of the present disclosure, and may be introduced into insect cells. For instance, the payload construct and/or region may encode an AADC protein.

### Inverted Terminal Repeats (ITRs)

[0067] The AAV particles of the present disclosure comprise a viral genome with at least one ITR region and a payload region. In certain embodiments, the viral genome has two ITRs. These two ITRs flank the payload region at the 5′ and 3′ ends. The ITRs function as origins of replication comprising recognition sites for replication. ITRs comprise sequence regions which can be complementary and symmetrically arranged. ITRs incorporated into viral genomes of the present disclosure may be comprised of naturally occurring polynucleotide sequences or recombinantly derived polynucleotide sequences.

[0068] The ITRs may be derived from the same serotype as the capsid, or a derivative thereof. The ITR may be of a different serotype than the capsid. In certain embodiments, the AAV particle has more than one ITR. In a non-limiting example, the AAV particle has a viral genome comprising two ITRs. In certain embodiments, the ITRs are of the same serotype as one another. In another embodiment, the ITRs are of different serotypes. Non-limiting examples comprise zero, one or both of the ITRs having the same serotype as the capsid. In certain embodiments both ITRs of the viral genome of the AAV particle are AAV2 ITRs.

[0069] Independently, each ITR may be about 100 to about 150 nucleotides in length. An ITR may be about 100-105 nucleotides in length, 106-110 nucleotides in length, 111-115 nucleotides in length, 116-120 nucleotides in length, 121-125 nucleotides in length, 126-130 nucleotides in length, 131-135 nucleotides in length, 136-140 nucleotides in length, 141-145 nucleotides in length or 146-150 nucleotides in length. In certain embodiments, the ITRs are 140-142 nucleotides in length. Non-limiting examples of ITR length are 102, 130, 140, 141, 142, 145 nucleotides in length.

[0070] In certain embodiments, each ITR may be 141 nucleotides in length. In certain embodiments, each ITR may be 130 nucleotides in length. In certain embodiments, each ITR may be 119 nucleotides in length.

[0071] In certain embodiments, the AAV particles comprise two ITRs and one ITR is 141 nucleotides in length and the other ITR is 130 nucleotides in length. In certain embodiments, the AAV particles comprise two ITRs and both ITRs are 141 nucleotides in length. Independently, each ITR may be about 75 to about 175 nucleotides in length. As a non-limiting example, the viral genome comprises an ITR that is about 130 nucleotides in length and an ITR that is about 141 nucleotides in length. As a non-limiting example, the viral genome may comprise two ITRs, each of which are about 141 nucleotides in length. In some embodiments, the viral genome comprises two ITRs (i.e., a 5′ ITR and a 3′ITR), each of which is 141 nucleotides in length.

[0072] In some embodiments, the viral genome comprises a 5′ ITR comprising a sequence at least 95%, at least 96%, at least 97%, at least 98%, at least 99%, or 100% identical to SEQ ID NO: 980. In some embodiments, the viral genome comprises a 5′ ITR comprising SEQ ID NO: 980. In some embodiments, the viral genome comprises a 3′ ITR comprising a sequence at least 95%, at least 96%, at least 97%, at least 98%, at least 99%, or 100% identical to SEQ ID NO: 991. In some embodiments, the viral genome comprises a 3′ ITR comprising SEQ ID NO: 991.

### Promoters

[0073] In certain embodiments, the payload region of the viral genome comprises at least one element to enhance the transgene target specificity and expression (See e.g., Powell et al. Viral Expression Cassette Elements to Enhance Transgene Target Specificity and Expression in Gene Therapy, 2015; the content of which is incorporated herein by reference in its entirety as related to payload/transgene enhancer elements, insofar as it does not conflict with the present disclosure). Non-limiting examples of elements to enhance the transgene target specificity and expression comprise promoters, endogenous miRNAs, post-transcriptional regulatory elements (PREs), polyadenylation (Poly(A)) signal sequences and upstream enhancers (USEs), CMV promoters, CMV enhancers, and introns.

[0074] A person skilled in the art may recognize that expression of the polypeptides of the present disclosure in a target cell may require a specific promoter, comprising but not limited to, a promoter that is species specific, inducible, tissue-specific, or cell cycle-specific (see Parr et al., Nat. Med.3:1145-9 (1997); the content of which is incorporated herein by reference in its entirety as related to polypeptide expression promoters, insofar as it does not conflict with the present disclosure).

[0075] In certain embodiments, the promoter drives expression of the polypeptide(s) encoded in the payload region of the viral genome of the AAV particle. In certain embodiments, the promoter drives expression in the cell being targeted. In certain embodiments, the promoter has a tropism for the cell being targeted. In certain embodiments, the promoter has a tropism for a viral production cell.

[0076] In certain embodiments, the promoter drives expression of the payload (e.g., AADC) for a period of time in targeted cells or tissues. Expression driven by a promoter may be for a period of 1-31 days (or any value or range therein), 1-23 months (or any value or range therein), 2-10 years (or any value or range therein), or more than 10 years. Expression may be for 1-5 hours, 1-12 hours, 1-2 days, 1-5 days, 1-2 weeks, 1-3 weeks, 1-4 weeks, 1-2 months, 1-4 months, 1-6 months, 2-6 months, 3-6 months, 3-9 months, 4-8 months, 6-12 months, 1-2 years, 1-5 years, 2-5 years, 3-6 years, 3-8 years, 4-8 years or 5-10 years. As a non-limiting example, the promoter can be a weak promoter for sustained expression of a payload in nervous (e.g., CNS) cells or tissues.

[0077] In certain embodiments, the promoter drives expression of the polypeptides of the present disclosure for at least 1-11 months (or any individual value therein), 2-65 years (or any individual value therein), or more than 65 years.

[0078] Promoters may be naturally occurring or non-naturally occurring. Non-limiting examples of promoters comprise viral promoters, plant promoters and mammalian promoters. In certain embodiments, the promoters may be human promoters. In certain embodiments, the promoter may be truncated or mutated.

[0079] Promoters which drive or promote expression in most tissues comprise, but are not limited to, human elongation factor 1α-subunit (EF1α), cytomegalovirus (CMV) immediate-early enhancer and/or promoter, chicken β-actin (CBA) and its derivative CAG, R glucuronidase (GUSB), or ubiquitin C (UBC). Tissue-specific expression elements can be used to restrict expression to certain cell types such as, but not limited to, muscle specific promoters, B cell promoters, monocyte promoters, leukocyte promoters, macrophage promoters, pancreatic acinar cell promoters, endothelial cell promoters, lung tissue promoters, astrocyte promoters, or nervous system promoters which can be used to restrict expression to neurons or subtypes of neurons, astrocytes, or oligodendrocytes.

[0080] Non-limiting examples of muscle-specific promoters comprise mammalian muscle creatine kinase (MCK) promoter, mammalian desmin (DES) promoter, mammalian troponin I (TNNI2) promoter, and mammalian skeletal alpha-actin (ASKA) promoter (see, e.g., U.S. Patent Publication US 20110212529, the content of which is incorporated herein by reference in its entirety as related to muscle-specific promoters, insofar as they do not conflict with the present disclosure)

[0081] Non-limiting examples of tissue-specific expression elements for neurons comprise neuron-specific enolase (NSE), platelet-derived growth factor (PDGF), platelet-derived growth factor B-chain (PDGF-β), synapsin (Syn), methyl-CpG binding protein 2 (MeCP2), Ca²⁺/calmodulin-dependent protein kinase II (CaMKII), metabotropic glutamate receptor 2 (mGluR2), neurofilament light chain (NFL) or neurofilament heavy chain (NFH), β-globin minigene nβ2, preproenkephalin (PPE), enkephalin (Enk) and excitatory amino acid transporter 2 (EAAT2) promoters. Non-limiting examples of tissue-specific expression elements for astrocytes comprise glial fibrillary acidic protein (GFAP) and EAAT2 promoters. A non-limiting example of a tissue-specific expression element for oligodendrocytes comprises the myelin basic protein (MBP) promoter.

[0082] In certain embodiments, the promoter may be less than 1 kb. The promoter may have a length of 200-800 nucleotides (or any value or range therein), or more than 800 nucleotides. The promoter may have a length between 200-300, 200-400, 200-500, 200-600, 200-700, 200-800, 300-400, 300-500, 300-600, 300-700, 300-800, 400-500, 400-600, 400-700, 400-800, 500-600, 500-700, 500-800, 600-700, 600-800 or 700-800.

[0083] The AAV particles of the present disclosure comprise a viral genome with at least one promoter region. As a non-limiting example, the viral genome comprises a promoter region that is about 204 nucleotides in length.

[0084] In certain embodiments, the promoter may be a combination of two or more components of the same or different starting or parental promoters such as, but not limited to, CMV and CBA. Each component may have a length of 200-800 nucleotides (or any value or range therein).

[0085] In certain embodiments, the viral genome comprises a ubiquitous promoter. Non-limiting examples of ubiquitous promoters comprise CMV, CBA (comprising derivatives CAG, CBh, etc.), EF-1α, PGK, UBC, GUSB (hGBp), and UCOE (promoter of HNRPA2B1-CBX3). In certain embodiments, the promoter region is derived from a CBA promoter sequence. As a non-limiting example, the promoter is 260 nucleotides in length.

[0086] Yu et al. (Molecular Pain 2011, 7:63; the content of which is incorporated herein by reference in its entirety, insofar as it does not conflict with the present disclosure) evaluated the expression of eGFP under the CAG, EFIu, PGK and UBC promoters in rat DRG cells and primary DRG cells using lentiviral vectors and found that UBC showed weaker expression than the other 3 promoters and only 10-12% glial expression was seen for all promoters. Soderblom et al. (E. Neuro 2015; the contents of which are each incorporated herein by reference in its entirety) evaluated the expression of eGFP in AAV8 with CMV and UBC promoters and AAV2 with the CMV promoter after injection in the motor cortex. Intranasal administration of a plasmid containing a UBC or EFIu promoter showed a sustained airway expression greater than the expression with the CMV promoter (See e.g., Gill et al., Gene Therapy 2001, Vol. 8, 1539-1546; the content of which is incorporated herein by reference in its entirety, insofar as it does not conflict with the present disclosure). Husain et al. (Gene Therapy 2009; the content of which is incorporated herein by reference in its entirety, insofar as it does not conflict with the present disclosure) evaluated an HOH construct with a hGUSB promoter, a HSV-1LAT promoter and an NSE promoter and found that the HOH construct showed weaker expression than NSE in mouse brain. Passini and Wolfe (J. Virol. 2001, 12382-12392, the content of which is incorporated herein by reference in its entirety, insofar as it does not conflict with the present disclosure) evaluated the long term effects of the HOH vector following an intraventricular injection in neonatal mice and found that there was sustained expression for at least 1 year. Low expression in all brain regions was found by Xu et al. (Gene Therapy 2001, 8, 1323-1332; the content of which is incorporated herein by reference in its entirety, insofar as it does not conflict with the present disclosure) when NFL and NFH promoters were used as compared to the CMV-lacZ, CMV-luc, EF, GFAP, hENK, nAChR, PPE, PPE+wpre, NSE (0.3 kb), NSE (1.8 kb) and NSE (1.8 kb+wpre). Xu et al. found that the promoter activity in descending order was NSE (1.8 kb), EF, NSE (0.3 kb), GFAP, CMV, hENK, PPE, NFL and NFH. NFL promoter is a 650-nucleotide promoter and NFH promoter is a 920-nucleotide promoter which are both absent in the liver but NFH promoter is abundant in the sensory proprioceptive neurons, brain and spinal cord and NFH promoter is present in the heart. SCN8A promoter is a 470 nucleotide promoter which expresses throughout the DRG, spinal cord and brain with particularly high expression seen in the hippocampal neurons and cerebellar Purkinje cells, cortex, thalamus and hypothalamus (See e.g., Drews et al. Identification of evolutionary conserved, functional noncoding elements in the promoter region of the sodium channel gene SCN8A, Mamm Genome (2007) 18:723-731; and Raymond et al. Expression of Alternatively Spliced Sodium Channel α-subunit genes, Journal of Biological Chemistry (2004) 279(44) 46234-46241; the contents of each of which are incorporated herein by reference in their entireties, insofar as they do not conflict with the present disclosure).

[0087] Any of the promoters taught by the aforementioned Yu, Soderblom, Gill, Husain, Passini, Xu, Drews or Raymond may be used in the present disclosures.

[0088] In certain embodiments, the promoter is not cell specific.

[0089] In certain embodiments, the promoter is a ubiquitin c (UBC) promoter. The UBC promoter may have a size of 300-350 nucleotides. As a non-limiting example, the UBC promoter is 332 nucleotides. In certain embodiments, the promoter is a β-glucuronidase (GUSB) promoter. The GUSB promoter may have a size of 350-400 nucleotides. As a non-limiting example, the GUSB promoter is 378 nucleotides. In certain embodiments, the promoter is a neurofilament light chain (NFL) promoter. The NFL promoter may have a size of 600-700 nucleotides. As a non-limiting example, the NFL promoter is 650 nucleotides. In certain embodiments, the promoter is a neurofilament heavy chain (NFH) promoter. The NFH promoter may have a size of 900-950 nucleotides. As a non-limiting example, the NFH promoter is 920 nucleotides. In certain embodiments, the promoter is a SCN8A promoter. The SCN8A promoter may have a size of 450-500 nucleotides. As a non-limiting example, the SCN8A promoter is 470 nucleotides.

[0090] In certain embodiments, the promoter is a frataxin (FXN) promoter. In certain embodiments, the promoter is a phosphoglycerate kinase 1 (PGK) promoter. In certain embodiments, the promoter is a chicken β-actin (CBA) promoter, or variant thereof. In certain embodiments, the promoter is a CB6 promoter. In certain embodiments, the promoter is a minimal CB promoter. In certain embodiments, the promoter is a cytomegalovirus (CMV) promoter. In certain embodiments, the promoter is a H1 promoter. In certain embodiments, the promoter is a CAG promoter. In certain embodiments, the promoter is a GFAP promoter. In certain embodiments, the promoter is a synapsin promoter. In certain embodiments, the promoter is an engineered promoter. In certain embodiments, the promoter is a liver or a skeletal muscle promoter. Non-limiting examples of liver promoters comprise human α-1-antitrypsin (hAAT) and thyroxine binding globulin (TBG). Non-limiting examples of skeletal muscle promoters comprise Desmin, MCK or synthetic C5-12. In certain embodiments, the promoter is an RNA pol III promoter. As a non-limiting example, the RNA pol III promoter is U6. As a non-limiting example, the RNA pol III promoter is H1. In certain embodiments, the promoter is a cardiomyocyte-specific promoter. Non-limiting examples of cardiomyocyte-specific promoters comprise uMHC, cTnT, and CMV-MLC2k. In certain embodiments, the viral genome comprises two promoters. As a non-limiting example, the promoters are an EFIu promoter and a CMV promoter.

[0091] In certain embodiments, the viral genome comprises an enhancer element, a promoter and/or a 5′ UTR intron. The enhancer element, also referred to herein as an “enhancer,” may be, but is not limited to, a CMV enhancer, the promoter may be, but is not limited to, a CMV, CBA, UBC, GUSB, NSE, Synapsin, MeCP2, and GFAP promoter and the 5′ UTR/intron may be, but is not limited to, SV40, and CBA-MVM. As a non-limiting example, the enhancer, promoter and/or intron used in combination may be: (1) CMV enhancer, CMV promoter, SV40 5′ UTR intron; (2) CMV enhancer, CBA promoter, SV-40 5′ UTR intron; (3) CMV enhancer, CBA promoter, CBA-MVM 5′ UTR intron; (4) UBC promoter; (5) GUSB promoter; (6) NSE promoter; (7) Synapsin promoter; (8) MeCP2 promoter and (9) GFAP promoter.

[0092] In certain embodiments, the viral genome comprises an engineered promoter.

[0093] In another embodiment, the viral genome comprises a promoter from a naturally expressed protein.

[0094] In some embodiments, the promoter comprises a sequence having at least 95%, at least 96%, at least 97%, at least 98%, at least 99%, or 100% identity to SEQ ID NO: 983. In some embodiments, the promoter comprises SEQ ID NO: 983.

[0095] In certain embodiments, the AAV particles of the present disclosure comprise a viral genome with at least one enhancer region. The enhancer region(s) may, independently, have a length such as, but not limited to, 300, 301, 302, 303, 304, 305, 306, 307, 308, 309, 310, 311, 312, 313, 314, 315, 316, 317, 318, 319, 320, 321, 322, 323, 324, 325, 326, 327, 328, 329, 330, 331, 332, 333, 334, 335, 336, 337, 338, 339, 340, 341, 342, 343, 344, 345, 346, 347, 348, 349, 350, 351, 352, 353, 354, 355, 356, 357, 358, 359, 360, 361, 362, 363, 364, 365, 366, 367, 368, 369, 370, 371, 372, 373, 374, 375, 376, 377, 378, 379, 380, 381, 382, 383, 384, 385, 386, 387, 388, 389, 390, 391, 392, 393, 394, 395, 396, 397, 398, 399, and 400 nucleotides. The length of the enhancer region for the viral genome may be 300-310, 300-325, 305-315, 310-320, 315-325, 320-330, 325-335, 325-350, 330-340, 335-345, 340-350, 345-355, 350-360, 350-375, 355-365, 360-370, 365-375, 370-380, 375-385, 375-400, 380-390, 385-395, and 390-400 nucleotides. As a non-limiting example, the viral genome comprises an enhancer region that is about 303 nucleotides in length.

[0096] In certain embodiments, the enhancer region is derived from a CMV enhancer sequence. As a non-limiting example, the CMV enhancer is 382 nucleotides in length.

[0097] In some embodiments, the enhancer comprises a sequence having at least 95%, at least 96%, at least 97%, at least 98%, at least 99%, or 100% identity to SEQ ID NO: 982. In some embodiments, the enhancer comprises SEQ ID NO: 982.

[0098] In some embodiments, the viral genome comprises a CMV enhancer and CMV promoter. In certain embodiments, the CMV enhancer comprises SEQ ID NO: 982 and the CMV promoter comprises SEQ ID NO: 983. In certain embodiments, the CMV enhancer is 303 nucleotides in length and the CMV promoter is 204 nucleotides in length.

### Untranslated Regions (UTRs)

[0099] Wild type untranslated regions (UTRs) of a gene are transcribed but not translated. Generally, the 5′ UTR starts at the transcription start site and ends at the start codon and the 3′ UTR starts immediately following the stop codon and continues until the termination signal for transcription.

[0100] Features typically found in abundantly expressed genes of specific target organs may be engineered into UTRs to enhance the stability and protein production. As a non-limiting example, a 5′ UTR from mRNA normally expressed in the liver (e.g., albumin, serum amyloid A, Apolipoprotein A/B/E, transferrin, alpha fetoprotein, erythropoietin, or Factor VIII) may be used in the viral genomes of the AAV particles of the present disclosure to enhance expression in hepatic cell lines or liver.

[0101] While not wishing to be bound by theory, wild-type 5′ untranslated regions (UTRs) may comprise features which play roles in translation initiation. Kozak sequences, which are commonly known to be involved in the process by which the ribosome initiates translation of many genes, are usually comprised in 5′ UTRs. Kozak sequences have the consensus CCR(A/G)CCAUGG, where R is a purine (adenine or guanine) three bases upstream of the start codon (ATG), which is followed by another ‘G’. In certain embodiments, the 5′ UTR in the viral genome comprises a Kozak sequence. In certain embodiments, the 5′ UTR in the viral genome does not comprise a Kozak sequence.

[0102] While not wishing to be bound by theory, wild-type 3′ UTRs often have stretches of Adenosines and Uridines embedded therein. These AU rich signatures are particularly prevalent in genes with high rates of turnover. Based on their sequence features and functional properties, the AU rich elements (AREs) can be separated into three classes (Chen et al, 1995, the content of which is incorporated herein by reference in its entirety as related to AU rich elements, insofar as it does not conflict with the present disclosure): Class I AREs, such as, but not limited to, c-Myc and MyoD, contain several dispersed copies of an AUUUA motif within U-rich regions. Class II AREs, such as, but not limited to, GM-CSF and TNF-α, possess two or more overlapping UUAUUUA(U/A)(U/A) nonamers. Class III ARES, such as, but not limited to, c-Jun and Myogenin, are less well defined. These U rich regions do not contain an AUUUA motif. Most proteins binding to the AREs are known to destabilize the messenger, whereas members of the ELAV family, most notably HuR, have been documented to increase the stability of mRNA. HuR binds to AREs of all the three classes. Engineering the HuR specific binding sites into the 3′ UTR of nucleic acid molecules will lead to HuR binding and thus, stabilization of the message in vivo.

[0103] Introduction, removal or modification of 3′ UTR AU rich elements (AREs) can be used to modulate the stability of polynucleotides. When engineering specific polynucleotides, (e.g., payload regions of viral genomes), one or more copies of an ARE can be introduced to make polynucleotides less stable and thereby curtail translation and decrease production of the resultant protein. Likewise, AREs can be identified and removed or mutated to increase the intracellular stability and thus increase translation and production of the resultant protein.

[0104] In certain embodiments, the 3′ UTR of the viral genome may comprise an oligo(dT) sequence for templated addition of a poly-A tail.

[0105] In certain embodiments, the viral genome may comprise at least one miRNA seed, binding site or full sequence. MicroRNAs (or miRNA or miR) are 19-25 nucleotide noncoding RNAs that bind to the sites of nucleic acid targets and down-regulate gene expression either by reducing nucleic acid molecule stability or by inhibiting translation. A microRNA sequence comprises a “seed” region, i.e., a sequence in the region of positions 2-8 of the mature microRNA, which sequence has perfect Watson-Crick complementarity to the miRNA target sequence of the nucleic acid.

[0106] In certain embodiments, the viral genome may be engineered to comprise, alter or remove at least one miRNA binding site, sequence or seed region.

[0107] Any UTR from any gene known in the art may be incorporated into the viral genome of the AAV particle. These UTRs, or portions thereof, may be placed in the same orientation as in the gene from which they were selected, or they may be altered in orientation or location. In certain embodiments, the UTR used in the viral genome of the AAV particle may be inverted, shortened, lengthened, made with one or more other 5′ UTRs or 3′ UTRs known in the art. As used herein, the term “altered” as it relates to a UTR, means that the UTR has been changed in some way in relation to a reference sequence. For example, a 3′ or 5′ UTR may be altered relative to a wild type or native UTR by the change in orientation or location as taught above or may be altered by the inclusion of additional nucleotides, deletion of nucleotides, swapping or transposition of nucleotides.

[0108] In certain embodiments, the viral genome of the AAV particle comprises at least one artificial UTRs which is not a variant of a wild type UTR.

[0109] In certain embodiments, the viral genome of the AAV particle comprises UTRs which have been selected from a family of transcripts whose proteins share a common function, structure, feature or property.

### Polyadenylation Sequence

[0110] In certain embodiments, the viral genome of the AAV particles of the present disclosure comprise at least one polyadenylation sequence. The viral genome of the AAV particle may comprise a polyadenylation sequence between the 3′ end of the payload (e.g., AADC) coding region and the 5′ end of the 3′ ITR. The viral genome of the AAV particle may comprise a polyadenylation sequence between the 3′ end of a multiple cloning site region and the 5′ end of the 3′ ITR.

[0111] In certain embodiments, the polyadenylation sequence or “poly(A) sequence” (also referred to as “poly(A) signal”) may range from absent to about 500 nucleotides in length. The polyadenylation sequence may be, but is not limited to, 1-500 nucleotides in length (or any value or range therein).

[0112] In certain embodiments, the polyadenylation sequence is 127 nucleotides in length. In certain embodiments, the polyadenylation sequences is 477 nucleotides in length. In certain embodiments, the polyadenylation sequence is 552 nucleotides in length.

[0113] In certain embodiments the poly(A) signal comprises a sequence having at least 95%, at least 96%, at least 97%, at least 98%, at least 99%, or 100% identity to SEQ ID NO: 990. In some embodiments, the poly(A) signal comprises SEQ ID NO: 990.

### Linkers

[0114] Viral genomes of the present disclosure may be engineered with one or more spacer or linker regions to separate coding or non-coding regions.

[0115] In certain embodiments, the payload region of the AAV particle may optionally encode one or more linker sequences. In some cases, the linker may be a peptide linker that may be used to connect the polypeptides encoded by the payload region. Some peptide linkers may be cleaved after expression to separate polypeptide domains, allowing assembly of mature protein fragments. Linker cleavage may be enzymatic. In some cases, linkers comprise an enzymatic cleavage site to facilitate intracellular or extracellular cleavage. Some payload regions encode linkers that interrupt polypeptide synthesis during translation of the linker sequence from an mRNA transcript. Such linkers may facilitate the translation of separate protein domains (e.g., heavy and light chain antibody domains) from a single transcript. In some cases, two or more linkers are encoded by a payload region of the viral genome.

[0116] In certain embodiments, payload regions encode linkers comprising furin cleavage sites. Furin is a calcium dependent serine endoprotease that cleaves proteins just downstream of a basic amino acid target sequence (Arg-X-(Arg/Lys)-Arg) (Thomas, G., 2002. Nature Reviews Molecular Cell Biology 3(10): 753-66; the content of which is incorporated herein by reference in its entirety as related to linker molecules or sequences, insofar as it does not conflict with the present disclosure). Furin is enriched in the trans-golgi network where it is involved in processing cellular precursor proteins. Furin also plays a role in activating a number of pathogens. This activity can be taken advantage of for expression of polypeptides of the disclosure.

[0117] In certain embodiments, payload regions encode linkers comprising 2A peptides. 2A peptides are small “self-cleaving” peptides (18-22 amino acids) derived from viruses such as foot-and-mouth disease virus (F2A), porcine teschovirus-1 (P2A), Thoseaasigna virus (T2A), or equine rhinitis A virus (E2A). The 2A designation refers specifically to a region of picornavirus polyproteins that lead to a ribosomal skip at the glycyl-prolyl bond in the C-terminus of the 2A peptide (Kim, J. H. et al., 2011. PLoS One 6(4): e18556; the content of which is incorporated herein by reference in its entirety as related to 2A peptide linkers, insofar as it does not conflict with the present disclosure). This skip results in a cleavage between the 2A peptide and its immediate downstream peptide. As opposed to IRES linkers, 2A peptides generate stoichiometric expression of proteins flanking the 2A peptide and their shorter length can be advantageous in generating viral expression vectors.

[0118] In certain embodiments, payload regions encode linkers comprising IRES. Internal ribosomal entry site (IRES) is a nucleotide sequence (>500 nucleotides) that allows for initiation of translation in the middle of an mRNA sequence (Kim, J. H. et al., 2011. PLoS One 6(4): e18556; the content of which is incorporated herein by reference in its entirety as related to IRES regions and linkers, insofar as it does not conflict with the present disclosure). Use of an IRES sequence ensures co-expression of genes before and after the IRES, though the sequence following the IRES may be transcribed and translated at lower levels than the sequence preceding the IRES sequence.

[0119] In certain embodiments, the payload region may encode one or more linkers comprising cathepsin, matrix metalloproteinases or legumain cleavage sites. Such linkers are described e.g., by Cizeau and Macdonald in International Publication No. WO2008052322, the content of which is incorporated herein by reference in its entirety as related to linker molecules and sequences, insofar as it does not conflict with the present disclosure. Cathepsins are a family of proteases with unique mechanisms to cleave specific proteins. Cathepsin B is a cysteine protease and cathepsin D is an aspartyl protease. Matrix metalloproteinases are a family of calcium-dependent and zinc-containing endopeptidases. Legumain is an enzyme catalyzing the hydrolysis of (-Asn-Xaa-) bonds of proteins and small molecule substrates.

[0120] In certain embodiments, payload regions may encode linkers that are not cleaved. Such linkers may comprise a simple amino acid sequence, such as a glycine rich sequence. In some cases, linkers may comprise flexible peptide linkers comprising glycine and serine residues. These flexible linkers are small and without side chains so they tend not to influence secondary protein structure while providing a flexible linker between antibody segments (George, R. A., et al., 2002. Protein Engineering 15(11): 871-9; Huston, J. S. et al., 1988. PNAS 85:5879-83; and Shan, D. et al., 1999. Journal of Immunology. 162(11):6589-95; the contents of which are each incorporated herein by reference in their entireties as related to linker molecules and sequences, insofar as they do not conflict with the present disclosure). Furthermore, the polarity of the serine residues improves solubility and prevents aggregation problems.

[0121] In certain embodiments, payload regions of the present disclosure may encode small and unbranched serine-rich peptide linkers, such as those described by Huston et al. in U.S. Pat. No. 5,525,491, the content of which is incorporated herein by reference in its entirety as related to linker molecules and sequences, insofar as it does not conflict with the present disclosure. Polypeptides encoded by the payload region of the present disclosure, linked by serine-rich linkers, have increased solubility.

[0122] In certain embodiments, payload regions of the present disclosure may encode artificial linkers, such as those described by Whitlow and Filpula in U.S. Pat. No. 5,856,456 and Ladner et al. in U.S. Pat. No. 4,946,778, the contents of which are each incorporated herein by reference in their entireties as related to linker molecules and sequences, insofar as they do not conflict with the present disclosure.

[0123] In certain embodiments, the linker region may be 1-50, 1-100, 50-100, 50-150, 100-150, 100-200, 150-200, 150-250, 200-250, 200-300, 250-300, 250-350, 300-350, 300-400, 350-400, 350-450, 400-450, 400-500, 450-500, 450-550, 500-550, 500-600, 550-600, 550-650, or 600-650 nucleotides in length. The linker region may have a length of 1-650 nucleotides (or any value or range therein) or greater than 650. In certain embodiments, the linker region may be 12 nucleotides in length. In certain embodiments, the linker region may be 18 nucleotides in length. In certain embodiments, the linker region may be 45 nucleotides in length. In certain embodiments, the linker region may be 54 nucleotides in length. In certain embodiments, the linker region may be 66 nucleotides in length. In certain embodiments, the linker region may be 75 nucleotides in length. In certain embodiments, the linker region may be 78 nucleotides in length. In certain embodiments, the linker region may be 87 nucleotides in length. In certain embodiments, the linker region may be 108 nucleotides in length. In certain embodiments, the linker region may be 153 nucleotides in length. In certain embodiments, the linker region may be 198 nucleotides in length. In certain embodiments, the linker region may be 623 nucleotides in length.

### Introns and Exons

[0124] In certain embodiments, the vector genome comprises at least one element to enhance the transgene target specificity and expression (See e.g., Powell et al. Viral Expression Cassette Elements to Enhance Transgene Target Specificity and Expression in Gene Therapy, 2015; the content of which is incorporated herein by reference in its entirety as related to transgene targeting enhancers, insofar as it does not conflict with the present disclosure) such as an intron. Non-limiting examples of introns comprise, MVM (67-97 bps), FIX truncated intron 1 (300 bps), β-globin SD/immunoglobulin heavy chain splice acceptor (250 bps), adenovirus splice donor/immunoglobin splice acceptor (500 bps), SV40 late splice donor/splice acceptor (19S/16S) (180 bps) and hybrid adenovirus splice donor/IgG splice acceptor (230 bps).

[0125] In certain embodiments, the intron or intron portion may be 100-500 nucleotides in length. The intron may have a length of 80, 90, 100, 110, 120, 130, 140, 150, 160, 170, 171, 172, 173, 174, 175, 176, 177, 178, 179, 180, 190, 200, 210, 220, 230, 240, 250, 260, 270, 280, 290, 300, 310, 320, 330, 340, 350, 360, 370, 380, 390, 400, 410, 420, 430, 440, 450, 460, 470, 480, 490 or 500. The intron may have a length between 80-100, 80-120, 80-140, 80-160, 80-180, 80-200, 80-250, 80-300, 80-350, 80-400, 80-450, 80-500, 200-300, 200-400, 200-500, 300-400, 300-500, or 400-500. In some embodiments, the intron or intron portion comprises a region that is about 32 nucleotides in length. In some embodiments, the intron or intron portion comprises SEQ ID NO: 985. In some embodiments, the intron or intron portion comprises a region that is about 347 nucleotides in length. In some embodiments, the intron or intron portion comprises SEQ ID NO: 986.

[0126] In certain embodiments, the AAV particles of the present disclosure can comprise a viral genome with at least one exon region. The exon region(s) may, independently, have a length such as, but not limited to, 2, 3, 4, 5, 6, 7, 8, 9, 10, 11, 12, 13, 14, 15, 16, 17, 18, 19, 20, 21, 22, 23, 24, 25, 26, 27, 28, 29, 30, 31, 32, 33, 34, 35, 36, 37, 38, 39, 40, 41, 42, 43, 44, 45, 46, 47, 48, 49, 50, 51, 52, 53, 54, 55, 56, 57, 58, 59, 60, 61, 62, 63, 64, 65, 66, 67, 68, 69, 70, 71, 72, 73, 74, 75, 76, 77, 78, 79, 80, 81, 82, 83, 84, 85, 86, 87, 88, 89, 90, 91, 92, 93, 94, 95, 96, 97, 98, 99, 100, 101, 102, 103, 104, 105, 106, 107, 108, 109, 110, 111, 112, 113, 114, 115, 116, 117, 118, 119, 120, 121, 122, 123, 124, 125, 126, 127, 128, 129, 130, 131, 132, 133, 134, 135, 136, 137, 138, 139, 140, 141, 142, 143, 144, 145, 146, 147, 148, 149, and 150 nucleotides. The length of the exon region for the viral genome may be 2-10, 5-10, 5-15, 10-20, 10-30, 10-40, 15-20, 15-25, 20-30, 20-40, 20-50, 25-30, 25-35, 30-40, 30-50, 30-60, 35-40, 35-45, 40-50, 40-60, 40-70, 45-50, 45-55, 50-60, 50-70, 50-80, 55-60, 55-65, 60-70, 60-80, 60-90, 65-70, 65-75, 70-80, 70-90, 70-100, 75-80, 75-85, 80-90, 80-100, 80-110, 85-90, 85-95, 90-100, 90-110, 90-120, 95-100, 95-105, 100-110, 100-120, 100-130, 105-110, 105-115, 110-120, 110-130, 110-140, 115-120, 115-125, 120-130, 120-140, 120-150, 125-130, 125-135, 130-140, 130-150, 135-140, 135-145, 140-150, and 145-150 nucleotides. As a non-limiting example, the viral genome comprises an exon region that is about 53 nucleotides in length. As a non-limiting example, the viral genome comprises an exon region that is about 134 nucleotides in length.

[0127] In certain embodiments, the viral genome of the AAV particle comprises an intron region between the 3′ end of a promoter region and the 5′ end of a payload (e.g., AADC) coding region. In some embodiments, the intron region comprises one or more of “immediate-early” ie1 exon 1, an ie1 intron 1 (e.g., “partial ie1 intron 1”), a human beta-globin intron 2, and a human beta-globin exon 3. In some embodiments, the intron region comprises an ie1 exon 1, an ie1 intron 1 (e.g., “partial ie1 intron 1”), a human beta-globin intron 2, and a human beta-globin exon 3.

[0128] In some embodiments, the intron region comprises one or more of SEQ ID NOs: 984-987. In some embodiments, the intron region comprises, in order from 5′ to 3′, SEQ ID NOs: 984-987.

### Stuffer Sequences

[0129] In certain embodiments, the viral genome comprises at least one element to improve packaging efficiency and expression, such as a stuffer or filler sequence. Non-limiting examples of stuffer sequences comprise albumin and/or alpha-1 antitrypsin. Any known viral, mammalian, or plant sequence may be manipulated for use as a stuffer sequence.

[0130] In certain embodiments, the stuffer or filler sequence may be from about 100-3500 nucleotides in length. The stuffer sequence may have a length of about 100, 200, 300, 400, 500, 600, 700, 800, 900, 1000, 1100, 1200, 1300, 1400, 1500, 1600, 1700, 1800, 1900, 2000, 2100, 2200, 2300, 2400, 2500, 2600, 2700, 2800, 2900 or 3000.

### Multiple Cloning Site (MCS) Region

[0131] In certain embodiments, the AAV particles of the present disclosure comprise a viral genome with at least one multiple cloning site (MCS) region. The MCS region(s) may, independently, have a length such as, but not limited to, 2, 3, 4, 5, 6, 7, 8, 9, 10, 11, 12, 13, 14, 15, 16, 17, 18, 19, 20, 21, 22, 23, 24, 25, 26, 27, 28, 29, 30, 31, 32, 33, 34, 35, 36, 37, 38, 39, 40, 41, 42, 43, 44, 45, 46, 47, 48, 49, 50, 51, 52, 53, 54, 55, 56, 57, 58, 59, 60, 61, 62, 63, 64, 65, 66, 67, 68, 69, 70, 71, 72, 73, 74, 75, 76, 77, 78, 79, 80, 81, 82, 83, 84, 85, 86, 87, 88, 89, 90, 91, 92, 93, 94, 95, 96, 97, 98, 99, 100, 101, 102, 103, 104, 105, 106, 107, 108, 109, 110, 111, 112, 113, 114, 115, 116, 117, 118, 119, 120, 121, 122, 123, 124, 125, 126, 127, 128, 129, 130, 131, 132, 133, 134, 135, 136, 137, 138, 139, 140, 141, 142, 143, 144, 145, 146, 147, 148, 149, and 150 nucleotides. The length of the MCS region for the viral genome may be 2-10, 5-10, 5-15, 10-20, 10-30, 10-40, 15-20, 15-25, 20-30, 20-40, 20-50, 25-30, 25-35, 30-40, 30-50, 30-60, 35-40, 35-45, 40-50, 40-60, 40-70, 45-50, 45-55, 50-60, 50-70, 50-80, 55-60, 55-65, 60-70, 60-80, 60-90, 65-70, 65-75, 70-80, 70-90, 70-100, 75-80, 75-85, 80-90, 80-100, 80-110, 85-90, 85-95, 90-100, 90-110, 90-120, 95-100, 95-105, 100-110, 100-120, 100-130, 105-110, 105-115, 110-120, 110-130, 110-140, 115-120, 115-125, 120-130, 120-140, 120-150, 125-130, 125-135, 130-140, 130-150, 135-140, 135-145, 140-150, and 145-150 nucleotides. As a non-limiting example, the viral genome comprises an MCS region that is about 5 nucleotides in length. As a non-limiting example, the viral genome comprises an MCS region that is about 10 nucleotides in length. As a non-limiting example, the viral genome comprises an MCS region that is about 14 nucleotides in length. As a non-limiting example, the viral genome comprises an MCS region that is about 18 nucleotides in length. As a non-limiting example, the viral genome comprises an MCS region that is about 73 nucleotides in length. As a non-limiting example, the viral genome comprises an MCS region that is about 121 nucleotides in length.

[0132] In certain embodiments, the MCS region is 5 nucleotides in length.

[0133] In certain embodiments, the MCS region is 10 nucleotides in length.

[0134] In certain embodiments, the MCS region comprises an MCS sequence that is 18 nucleotides in length. In certain embodiments, a viral genome comprises a first and second MCS region, wherein each comprises an MCS sequence that is 18 nucleotides in length.

[0135] In some embodiments, the 5′ ITR is followed by a region comprising a first multiple cloning site (MCS). In some embodiments, the first MCS comprises at least 95%, at least 96%, at least 97%, at least 98%, at least 99%, or 100% identical to SEQ ID NO: 981. In certain embodiments, the first MCS comprises SEQ ID NO: 981.

[0136] In some embodiments, the 3′ ITR is preceded by a region comprising a second MCS. In some embodiments, the second MCS precedes (e.g., is 5′ to) a poly(A) signal region, which precedes (is 5′ to) the 3′ ITR. In some embodiments, the second MCS comprises at least 95%, at least 96%, at least 97%, at least 98%, at least 99%, or 100% identical to SEQ ID NO: 989. In certain embodiments, the second MCS comprises SEQ ID NO: 989.

### Genome Size

[0137] In certain embodiments, the AAV particle which comprises a payload described herein may be single stranded or double stranded vector genome. The size of the vector genome may be small, medium, large or the maximum size. Additionally, the vector genome may comprise a promoter and a poly(A) signal.

[0138] In certain embodiments, the vector genome which comprises a payload described herein may be a small single stranded vector genome. A small single stranded vector genome may be 2.1 to 3.5 kb in size such as about 2.1, 2.2, 2.3, 2.4, 2.5, 2.6, 2.7, 2.8, 2.9, 3.0, 3.1, 3.2, 3.3, 3.4, and 3.5 kb in size. As a non-limiting example, the small single stranded vector genome may be 3.2 kb in size. As another non-limiting example, the small single stranded vector genome may be 2.2 kb in size. Additionally, the vector genome may comprise a promoter and a poly(A) signal.

[0139] In certain embodiments, the vector genome which comprises a payload described herein may be a small double stranded vector genome. A small double stranded vector genome may be 1.3 to 1.7 kb in size such as about 1.3, 1.4, 1.5, 1.6, and 1.7 kb in size. As a non-limiting example, the small double stranded vector genome may be 1.6 kb in size. Additionally, the vector genome may comprise a promoter and a poly(A) signal.

[0140] In certain embodiments, the vector genome which comprises a payload described herein may be a medium single stranded vector genome. A medium single stranded vector genome may be 3.6 to 4.3 kb in size such as about 3.6, 3.7, 3.8, 3.9, 4.0, 4.1, 4.2 and 4.3 kb in size. As a non-limiting example, the medium single stranded vector genome may be 4.0 kb in size. Additionally, the vector genome may comprise a promoter and a poly(A) signal.

[0141] In certain embodiments, the vector genome which comprises a payload described herein may be a medium double stranded vector genome. A medium double stranded vector genome may be 1.8 to 2.1 kb in size such as about 1.8, 1.9, 2.0, and 2.1 kb in size. As a non-limiting example, the medium double stranded vector genome may be 2.0 kb in size. Additionally, the vector genome may comprise a promoter and a poly(A) signal.

[0142] In certain embodiments, the vector genome which comprises a payload described herein may be a large single stranded vector genome. A large single stranded vector genome may be 4.4 to 6.0 kb in size such as about 4.4, 4.5, 4.6, 4.7, 4.8, 4.9, 5.0, 5.1, 5.2, 5.3, 5.4, 5.5, 5.6, 5.7, 5.8, 5.9 and 6.0 kb in size. As a non-limiting example, the large single stranded vector genome may be 4.7 kb in size. As another non-limiting example, the large single stranded vector genome may be 4.8 kb in size. As yet another non-limiting example, the large single stranded vector genome may be 6.0 kb in size. Additionally, the vector genome may comprise a promoter and a poly(A) signal.

[0143] In certain embodiments, the vector genome which comprises a payload described herein may be a large double stranded vector genome. A large double stranded vector genome may be 2.2 to 3.0 kb in size such as about 2.2, 2.3, 2.4, 2.5, 2.6, 2.7, 2.8, 2.9 and 3.0 kb in size. As a non-limiting example, the large double stranded vector genome may be 2.4 kb in size. Additionally, the vector genome may comprise a promoter and a poly(A) signal.

### Exemplary AADC Polynucleotide (Payload) Constructs

[0144] According to the present disclosure, aromatic L-amino acid decarboxylase (AADC; also known as dopa decarboxylase or DDC) polynucleotides are provided which function alone or in combination with additional nucleic acid sequence(s) to encode the AADC protein. Such polynucleotides may be included in the vectors, AAVs, and constructs discussed herein and/or produced according to the methods disclosed herein. As used herein an “AADC polynucleotide” is any nucleic acid polymer (i.e., nucleic acid sequence) which encodes an AADC protein and when present in a vector, plasmid or translatable construct, expresses such AADC protein in a cell, tissue, organ or organism. In some embodiments, the AADC polynucleotide used in the methods and systems disclosed herein encodes an AADC protein of SEQ ID NO: 978 or a functional fragment thereof. In some embodiments, the polynucleotide encoding SEQ ID NO: 978 comprises SEQ ID NO: 979.

[0145] AADC polynucleotides include precursor molecules which are processed inside the cell. AADC polynucleotides or the processed forms thereof may be encoded in a plasmid, vector, genome or other nucleic acid expression vector for delivery to a cell.

[0146] In some embodiments AADC polynucleotides are designed as components of AAV viral genomes and packaged in AAV particles which are processed within the cell to produce the wild type AADC protein.

[0147] In some embodiments, the AADC polynucleotide may be the payload of the AAV particle.

[0148] As used herein, the wild type AADC protein may be any of the naturally occurring isoforms or variants from the DDC gene. Multiple alternatively spliced transcript variants encoding different isoforms of AADC have been identified. Specifically, the DDC gene produces seven transcript variants that encode six distinct isoforms. DDC transcript variants 1 and 2 both encode AADC isoform 1. In some embodiments, the AADC polynucleotides used in the compositions, methods, and systems disclosed herein encode DDC transcript variant 2, thereby encoding a native AADC isoform 1 (NCBI Reference Sequence: NP_000781.1). This protein sequence is given here:

(SEQ ID NO: 978)
MNASEFRRRGKEMVDYVANYMEGIEGRQVYPDVEPGYLRPLIPAAAPQE
PDTFEDIINDVEKIIMPGVTHWHSPYFFAYFPTASSYPAMLADMLCGAI
GCIGFSWAASPACTELETVMMDWLGKMLELPKAFLNEKAGEGGGVIQGS
ASEATLVALLAARTKVIHRLQAASPELTQAAIMEKLVAYSSDQAHSSVE
RAGLIGGVKLKAIPSDGNFAMRASALQEALERDKAAGLIPFFMVATLGT
TTCCSFDNLLEVGPICNKEDIWLHVDAAYAGSAFICPEFRHLLNGVEFA
DSFNFNPHKWLLVNFDCSAMWVKKRTDLTGAFRLDPTYLKHSHQDSGLI
TDYRHWQIPLGRRFRSLKMWFVFRMYGVKGLQAYIRKHVQLSHEFESLV
RQDPRFEICVEVILGLVCFRLKGSNKVNEALLQRINSAKKIHLVPCHLR
DKFVLRFAICSRTVESAHVQRAWEHIKELAADVLRAERE.

[0149] Functional variants of AADC, e.g., those retaining at least 90% or at least 95% sequence identity to SEQ ID NO: 978, may also be used. Codon-optimized and other variants that encode the same or essentially the same AADC amino acid sequence (e.g., those having at least 90%, at least 95%, at least 96%, at least 97%, at least 98%, or at least 99% amino acid sequence identity) may also be used. A functional variant is a variant that retains some or all of the activity of its wild-type counterpart (e.g., SEQ ID NO: 978), so as to achieve a desired therapeutic effect. For example, in some embodiments, a functional variant is effective to be used in gene therapy to treat a disorder or condition. In a non-limiting example, a functional variant (e.g., of AADC, e.g., of SEQ ID NO: 978) may have the ability to catalyze the decarboxylation of L-3,4-dihydroxyphenylalanine (L-DOPA or levodopa) to dopamine; L-5-hydroxytryptophan to serotonin; and/or L-tryptophan to tryptamine. In some embodiments, a functional variant is effective to be used in gene therapy to treat Parkinson's Disease. In some embodiments, a functional variant is effective to be used in gene therapy to treat AADC deficiency. Unless indicated otherwise, a variant of AADC as described herein (e.g., in the context of the constructs, vectors, genomes, methods, kits, compositions, etc. of the disclosure) is a functional variant.

[0150] The AADC polynucleotides of the disclosure, may be engineered to contain modular elements and/or sequence motifs assembled to create AADC polynucleotide constructs.

[0151] According to the present disclosure, AADC polynucleotides are provided. Such polynucleotides comprise nucleic acid polymers which comprise a region of linked nucleosides encoding one or more isoforms or variants of the AADC protein.

[0152] In some embodiments, the AADC polynucleotide comprises a codon optimized transcript encoding an AADC protein.

[0153] In some embodiments, the AADC polynucleotide comprises a sequence region encoding one or more wild type isoforms or variants of an AADC protein, e.g., encoding SEQ ID NO: 978. Such polynucleotides may also comprise a sequence region encoding any one or more of the following: a 5′ ITR, a cytomegalovirus (CMV) Enhancer, a CMV Promoter, an ie1 exon 1, an ie1 intron1, an hbBglobin intron2, an hBglobin exon 3, a 5′ UTR, a 3′ UTR, an hGH poly(A) signal, and/or a 3′ ITR. Such sequence regions are taught herein or may be any of those known in the art. In some embodiments, such a polynucleotide sequence comprises SEQ ID NO: 979.

[0154] In some embodiments, a suitable AADC polynucleotide, e.g., in a payload construct and/or payload region of the present disclosure may be described by International Patent Publication WO2016073693 or US20190358306A1, the contents of which are herein incorporated by reference in their entirety.

[0155] In some embodiments, a suitable AADC polynucleotide, e.g., in a payload construct and/or payload region of the present disclosure may be described by International Patent Publication WO2018232055 or US20190343937A1, the contents of which are herein incorporated by reference in their entirety.

[0156] In some embodiments, an AADC polynucleotide, e.g., in a payload construct and/or payload region of the present disclosure, comprises the following regions or sequences with 90% identity or greater (e.g., at least 95% identity) to those listed below:

TABLE 1

| Region | Start | Stop | Length of Region | SEQ ID NO of region |
|---|---|---|---|---|
| 5′ ITR | 1 | 141 | 141 | 980 |
| MCS | 189 | 206 | 18 | 981 |
| CMV enhancer | 213 | 515 | 303 | 982 |
| CMV promoter | 516 | 719 | 204 | 983 |
| Ie1 exon 1 | 734 | 867 | 134 | 984 |
| Ie1 intron partial | 868 | 899 | 32 | 985 |
| hBglobin intron 2 | 900 | 1246 | 347 | 986 |
| hBglobin exon 3 | 1247 | 1299 | 53 | 987 |
| A ADC | 1338 | 2777 | 1440 | 988 |
| MCS | 2820 | 2837 | 18 | 989 |
| Poly(A) | 2838 | 3314 | 477 | 990 |
| 3′ ITR | 3386 | 3526 | 141 | 991 |

[0157] In some embodiments, the AADC polynucleotide comprises SEQ ID NO: 979 or a fragment or variant thereof. This AADC polynucleotide sequence is given here:

(SEQ ID NO: 979)
5’cctgcaggcagctgcgcgctcgctcgctcactgaggccgcccgggcaaagcccgggcgtcgggcgacctttggt
cgcccggcctcagtgagcgagcgagcgcgcagagagggagtggccaactccatcactaggggttccttgtagttaatgattaacccg
ccatgctacttatctacgtagccatgcgtcgacataacgcgtatatctagacgttacataacttacggtaaatggcccgcctggctgacc
gcccaacgacccccgcccattgacgtcaataatgacgtatgttcccatagtaacgccaatagggactttccattgacgtcaatgggtgg
agtatttacggtaaactgcccacttggcagtacatcaagtgtatcatatgccaagtacgccccctattgacgtcaatgacggtaaatggc
ccgcctggcattatgcccagtacatgaccttatgggactttcctacttggcagtacatctagtattagtcatcgctattaccatggtgatgcg
gttttggcagtacatcaatgggcgtggatagcggtttgactcacggggatttccaagtctccaccccattgacgtcaatgggagtttgtttt
ggcaccaaaatcaacgggactttccaaaatgtcgtaacaactccgccccattgacgcaaatgggcggtaggcgtgtacggtgggagg
tctatataagcagagctcgtttagtgaaccgtcagatcgcctggagacgccatccacgctgttttgacctccatagaagacaccgggac
cgatccagcctccgcggattcgaatcccggccgggaacggtgcattggaacgcggattccccgtgccaagagtgacgtaagtaccg
cctatagagtctataggcccacaaaaaatgctttcttcttttaatatacttttttgtttatcttatttctaatactttccctaatctctttctttca
gggcaataatgatacaatgtatcatgcctctttgcaccattctaaagaataacagtgataatttctgggttaaggcaatagcaatatttctgcatat
aaatatttctgcatataaattgtaactgatgtaagaggtttcatattgctaatagcagctacaatccagctaccattctgcttttattttatggttg
ggataaggctggattattctgagtccaagctaggcccttttgctaatcatgttcatacctcttatcttcctcccacagctcctgggcaacgtg
ctggtctgtgtgctggcccatcactttggcaaagaattgggattcgaacatcgattgaattccccggggatccaccatgaacgcaagtg
aattccgaaggagagggaaggagatggtggattacgtggccaactacatggaaggcattgagggacgccaggtctaccctgacgtg
gagcccgggtacctgcggccgctgatccctgccgctgcccctcaggagccagacacgtttgaggacatcatcaacgacgttgagaa
gataatcatgcctggggtgacgcactggcacagcccctacttcttcgcctacttccccactgccagctcgtacccggccatgcttgcgg
acatgctgtgcggggccattggctgcatcggcttctcctgggcggcaagcccagcatgcacagagctggagactgtgatgatggact
ggctcgggaagatgctggaactaccaaaggcatttttgaatgagaaagctggagaagggggaggagtgatccagggaagtgccagt
gaagccaccctggtggccctgctggccgctcggaccaaagtgatccatcggctgcaggcagcgtccccagagctcacacaggccg
ctatcatggagaagctggtggcttactcatccgatcaggcacactcctcagtggaaagagctgggttaattggtggagtgaaattaaaa
gccatcccctcagatggcaacttcgccatgcgtgcgtctgccctgcaggaagccctggagagagacaaagcggctggcctgattcct
ttctttatggttgccaccctggggaccacaacatgctgctcctttgacaatctcttagaagtcggtcctatctgcaacaaggaagacatatg
gctgcacgttgatgcagcctacgcaggcagtgcattcatctgccctgagttccggcaccttctgaatggagtggagtttgcagattcatt
caactttaatccccacaaatggctattggtgaattttgactgttctgccatgtgggtgaaaaagagaacagacttaacgggagcctttaga
ctggaccccacttacctgaagcacagccatcaggattcagggcttatcactgactaccggcattggcagataccactgggcagaagat
ttcgctctttgaaaatgtggtttgtatttaggatgtatggagtcaaaggactgcaggcttatatccgcaagcatgtccagctgtcccatgag
tttgagtcactggtgcgccaggatccccgctttgaaatctgtgtggaagtcattctggggcttgtctgctttcggctaaagggttccaaca
aagtgaatgaagctcttctgcaaagaataaacagtgccaaaaaaatccacttggttccatgtcacctcagggacaagtttgtcctgcgctt
tgccatctgttctcgcacggtggaatctgcccatgtgcagcgggcctgggaacacatcaaagagctggcggccgacgtgctgcgagc
agagagggagtaggagtgaagccaggacctgcagaagcttgcctcgagcagcgctgctcgagagatctacgggtggcatccctgt
gacccctccccagtgcctctcctggccctggaagttgccactccagtgcccaccagccttgtcctaataaaattaagttgcatcattttgtc
tgactaggtgtccttctataatattatggggtggaggggggtggtatggagcaaggggcaagttgggaagacaacctgtagggcctgc
ggggtctattgggaaccaagctggagtgcagtggcacaatcttggctcactgcaatctccgcctcctgggttcaagcgattctcctgcct
cagcctcccgagttgttgggattccaggcatgcatgaccaggctcagctaatttttgtttttttggtagagacggggtttcaccatattggc
caggctggtctccaactcctaatctcaggtgatctacccaccttggcctcccaaattgctgggattacaggcgtgaaccactgctcccttc
cctgtccttactagatttaaatatgtcgtgcatcgatgctacgtagataagtagcatggcgggttaatcattaactacagaggaaccccta
gtgatggagttggccactccctctctgcgcgctcgctcgctcactgaggccgggcgaccaaaggtcgcccgacgcccgggctttgcc
cgggcggcctcagtgagcgagcgagcgcgcagctgcctgcagg3’.

[0158] In some embodiments, an AADC polynucleotide that comprises SEQ ID NO: 979 or a fragment or variant thereof is part of an AAV particle comprising an AAV2 capsid serotype. For example, the AAV particle may comprise wild-type AAV2 capsid.

[0159] In some embodiments, the AAV2 capsid is encoded by nucleic acid sequence SEQ ID NO: 1778. This nucleic sequence encoding the AAV2 capsid is given here:

(SEQ ID NO: 1778)
5’ctggctgccgacggttatctacccgattggctcgaggacactctctctgaaggaataagacagtggtggaagctca
aacctggcccaccaccaccaaagcccgcagagcggcataaggacgacagcaggggtcttgtgcttcctgggtacaagtacctcgga
cccttcaacggactcgacaagggagagccggtcaacgaggcagacgccgcggccctcgagcacgacaaagcctacgaccggca
gctcgacagcggagacaacccgtacctcaagtacaaccacgccgacgcggagtttcaggagcgccttaaagaagatacctcttttgg
gggcaacctcggacgagcagtcttccaggcgaaaaagagggttcttgaacctctgggcctggttgaggaacctgttaagacggctcc
gggaaaaaagaggccggtagagcactctcctgtggagccagactcctcctcgggaaccggaaaggcgggccagcagcctgcaag
aaaaagattgaattttggtcagactggagacgcagactcagtacctgacccccagcctctcggacagccaccagcagccccctctggt
ctgggaactaatacgatggctacaggcagtggcgcaccaatggcagacaataacgagggcgccgacggagtgggtaattcctcgg
gaaattggcattgcgattccacatggatgggcgacagagtcatcaccaccagcacccgaacctgggccctgcccacctacaacaacc
acctctacaaacaaatttccagccaatcaggagcctcgaacgacaatcactactttggctacagcaccccttgggggtattttgacttcaa
cagattccactgccacttttcaccacgtgactggcaaagactcatcaacaacaactggggattccgacccaagagactcaacttcaagc
tctttaacattcaagtcaaagaggtcacgcagaatgacggtacgacgacgattgccaataaccttaccagcacggttcaggtgtttactg
actcggagtaccagctcccgtacgtcctcggctcggcgcatcaaggatgcctcccgccgttcccagcagacgtcttcatggtgccaca
gtatggatacctcaccctgaacaacgggagtcaggcagtaggacgctcttcattttactgcctggagtactttccttctcagatgctgcgt
accggaaacaactttaccttcagctacacttttgaggacgttcctttccacagcagctacgctcacagccagagtctggaccgtctcatg
aatcctctcatcgaccagtacctgtattacttgagcagaacaaacactccaagtggaaccaccacgcagtcaaggcttcagttttctcag
gccggagcgagtgacattcgggaccagtctaggaactggcttcctggaccctgttaccgccagcagcgagtatcaaagacatctgcg
gataacaacaacagtgaatactcgtggactggagctaccaagtaccacctcaatggcagagactctctggtgaatccgggcccggcc
atggcaagccacaaggacgatgaagaaaagttttttcctcagagcggggttctcatctttgggaagcaaggctcagagaaaacaaatg
tggacattgaaaaggtcatgattacagacgaagaggaaatcaggacaaccaatcccgtggctacggagcagtatggttctgtatctac
caacctccagagaggcaacagacaagcagctaccgcagatgtcaacacacaaggcgttcttccaggcatggtctggcaggacaga
gatgtgtaccttcaggggcccatctgggcaaagattccacacacggacggacattttcacccctctcccctcatgggtggattcggactt
aaacaccctcctccacagattctcatcaagaacaccccggtacctgcgaatccttcgaccaccttcagtgcggcaaagtttgcttccttc
atcacacagtactccacgggacaggtcagcgtggagatcgagtgggagctgcagaaggaaaacagcaaacgctggaatcccgaaa
ttcagtacacttccaactacaacaagtctgttaatgtggactttactgtggacactaatggcgtgtattcagagcctcgccccattggca
ccagatacctgactcgtaatctgtaa 3’.

[0160] In some embodiments, the AAV2 capsid comprises amino acid sequence SEQ ID NO: 16. This AAV2 capsid amino acid sequence is given here:

(SEQ ID NO: 16)
XAADGYLPDWLEDTLSEGIRQWWKLKPGPPPPKPAERHKDDSRGLVLPG
YKYLGPFNGLDKGEPVNEADAAALEHDKAYDRQLDSGDNPYLKYNHADA
EFQERLKEDTSFGGNLGRAVFQAKKRVLEPLGLVEEPVKTAPGKKRPVE
HSPVEPDSSSGTGKAGQQPARKRLNFGQTGDADSVPDPQPLGQPPAAPS
GLGTNTMATGSGAPMADNNEGADGVGNSSGNWHCDSTWMGDRVITTSTR
TWALPTYNNHLYKQISSQSGASNDNHYFGYSTPWGYFDFNRFHCHFSPR
DWQRLINNNWGFRPKRLNFKLFNIQVKEVTQNDGTTTIANNLTSTVQVF
TDSEYQLPYVLGSAHQGCLPPFPADVFMVPQYGYLTLNNGSQAVGRSSF
YCLEYFPSQMLRTGNNFTFSYTFEDVPFHSSYAHSQSLDRLMNPLIDQY
LYYLSRTNTPSGTTTQSRLQFSQAGASDIRDQSRNWLPGPCYRQQRVSK
TSADNNNSEYSWTGATKYHLNGRDSLVNPGPAMASHKDDEEKFFPQSGV
LIFGKQGSEKTNVDIEKVMITDEEEIRTTNPVATEQYGSVSTNLQRGNR
QAATADVNTQGVLPGMVWQDRDVYLQGPIWAKIPHTDGHFHPSPLMGGF
GLKHPPPQILIKNTPVPANPSTTFSAAKFASFITQYSTGQVSVEIEWEL
QKENSKRWNPEIQYTSNYNKSVNVDFTVDTNGVYSEPRPIGTRYLTRN
L, where X is M, L, or absent.

[0161] In some embodiments, the first amino acid of SEQ ID NO: 16 is a methionine. In some embodiments, the first amino acid of SEQ ID NO: 16 is a leucine. In some embodiments, the first amino acid of SEQ ID NO: 16 is post-translationally cleaved. In some embodiments, AAVs of the present disclosure comprise a mixed population of AAV2 capsids of SEQ ID NO: 16, in which the first amino acid may be methionine, leucine, or absent.

[0162] In certain embodiments, an AADC polynucleotide comprises a ribonucleotide form of SEQ ID NO: 979.

[0163] In certain embodiments, the AADC polynucleotide comprises a sequence which has a percent identity to any of SEQ ID NO: 979 or a fragment or variant thereof. The AADC polynucleotide may have 1%, 2%, 3%, 4%, 5%, 6%, 7%, 8%, 9%, 10%, 15%, 20%, 25%, 30%, 35%, 40%, 45%, 50%, 55%, 60%, 65%, 70%, 75%, 80%, 85%, 90%, 95%, 96%, 97%, 98%, 99% or 100% identity to any of SEQ ID NO: 979 or a fragment or variant thereof. The AADC polynucleotide may have 1-10%, 10-20%, 30-40%, 50-60%, 50-70%, 50-80%, 50-90%, 50-99%, 50-100%, 60-70%, 60-80%, 60-90%, 60-99%, 60-100%, 70-80%, 70-90%, 70-99%, 70-100%, 80-85%, 80-90%, 80-95%, 80-99%, 80-100%, 90-95%, 90-99%, or 90-100% to any of SEQ ID NO: 979 or a fragment or variant thereof. In certain embodiments, the AADC polynucleotide comprises a sequence which has 80% identity to any of SEQ ID NO: 979 or a fragment or variant thereof. In certain embodiments, the AADC polynucleotide comprises a sequence which has 85% identity to any of SEQ ID NO: 979 or a fragment or variant thereof. In certain embodiments, the AADC polynucleotide comprises a sequence which has 90% identity to any of SEQ ID NO: 979 or a fragment or variant thereof. In certain embodiments, the AADC polynucleotide comprises a sequence which has 95% identity to any of SEQ ID NO: 979 or a fragment or variant thereof. In certain embodiments, the AADC polynucleotide comprises a sequence which has 96% identity to any of SEQ ID NO: 979 or a fragment or variant thereof. In certain embodiments, the AADC polynucleotide comprises a sequence which has 97% identity to any of SEQ ID NO: 979 or a fragment or variant thereof. In certain embodiments, the AADC polynucleotide comprises a sequence which has 98% identity to any of SEQ ID NO: 979 or a fragment or variant thereof. In certain embodiments, the AADC polynucleotide comprises a sequence which has 99% identity to any of SEQ ID NO: 979 or a fragment or variant thereof. In certain embodiments, the AADC polynucleotide comprises a sequence which has at least 95% identity to SEQ ID NO: 979 and encodes SEQ ID NO: 978.

[0164] In some embodiments, the coding region of the AADC polynucleotide is 1440 nucleotides in length. Such an AADC polynucleotide may, for example, be codon optimized over all or a portion of the polynucleotide.

[0165] In some embodiments, the AADC polynucleotide comprises any of SEQ ID NO: 979 or a fragment or variant thereof but lacking the 5′ and/or 3′ ITRs. Such a polynucleotide may be incorporated into a plasmid or vector and utilized to express the encoded AADC protein.

[0166] In certain embodiments, the AADC polynucleotides may be produced in insect cells (e.g., Sf9 cells).

[0167] In certain embodiments, the AADC polynucleotide may comprise an open reading frame of an AADC mRNA, for example, a codon optimized open reading frame of an AADC mRNA, at least one 5′ITR and at least one 3′ITR where the one or more of the 5′ITRs may be located at the 5′end of the promoter region and one or more 3′ ITRs may be located at the 3′ end of the poly(A) signal. The AADC mRNA may comprise a promoter region, a 5′ untranslated region (UTR), a 3′UTR and a poly(A) signal. The promoter region may include, but is not limited to, enhancer element, a promoter element, and an intron region. In certain embodiments, the enhancer element and the promoter element are derived from CMV. In certain embodiments, the intron region comprises ie1 exon 1 or a fragment thereof, ie1 intron 1 or a fragment thereof, hBglobin intron 2 or a fragment thereof, and hBglobin exon 3 or a fragment thereof. As yet another non-limiting example, the poly(A) signal is derived from human growth hormone.

[0168] In certain embodiments, at least one element may be used with the AADC polynucleotides described herein to enhance the transgene target specificity and expression (See e.g., Powell et al. Viral Expression Cassette Elements to Enhance Transgene Target Specificity and Expression in Gene Therapy, 2015; the contents of which are herein incorporated by reference in its entirety). Non-limiting examples of elements to enhance the transgene target specificity and expression include promoters, endogenous miRNAs, post-transcriptional regulatory elements (PREs), polyadenylation (Poly(A)) signal sequences and upstream enhancers (USEs), CMV enhancers and introns.

[0169] In certain embodiments, at least one element may be used with the AADC polynucleotides described herein to enhance the transgene target specificity and expression (See e.g., Powell et al. Viral Expression Cassette Elements to Enhance Transgene Target Specificity and Expression in Gene Therapy, 2015; the contents of which are herein incorporated by reference in its entirety) such as promoters.

[0170] In certain embodiments, the AADC polynucleotide is encoded in a plasmid or vector, which may be derived from an adeno-associated virus (AAV).

[0171] In certain embodiments, the AAV particle of the disclosure comprises a recombinant AAV2 with a viral genome encoding a human AADC.

[0172] In certain embodiments, the AAV particle of the disclosure has a CAS (Chemical Abstracts Service) Registry Number of 2226647-27-2.

### AAV Serotypes

[0173] AAV particles of the present disclosure may comprise or be derived from a nucleic acid sequence encoding any natural or recombinant AAV serotype. In some embodiments, the preferred AAV serotype is AAV2. In some embodiments, an AAV particle of AAV2 serotype comprises an AAV2 capsid. According to the present disclosure, the AAV particles may utilize or be based on a serotype selected from any of the following PHP.B, PHP.A, AAV1, AAV2, AAV2G9, AAV3, AAV3a, AAV3b, AAV3-3, AAV4, AAV4-4, AAV5, AAV6, AAV6.1, AAV6.2, AAV6.1.2, AAV7, AAV7.2, AAV8, AAV9, AAV9.11, AAV9.13, AAV9.16, AAV9.24, AAV9.45, AAV9.47, AAV9.61, AAV9.68, AAV9.84, AAV9.9, AAV10, AAV11, AAV12, AAV16.3, AAV24.1, AAV27.3, AAV42.12, AAV42-1b, AAV42-2, AAV42-3a, AAV42-3b, AAV42-4, AAV42-5a, AAV42-5b, AAV42-6b, AAV42-8, AAV42-10, AAV42-11, AAV42-12, AAV42-13, AAV42-15, AAV42-aa, AAV43-1, AAV43-12, AAV43-20, AAV43-21, AAV43-23, AAV43-25, AAV43-5, AAV44.1, AAV44.2, AAV44.5, AAV223.1, AAV223.2, AAV223.4, AAV223.5, AAV223.6, AAV223.7, AAV1-7/rh.48, AAV1-8/rh.49, AAV2-15/rh.62, AAV2-3/rh.61, AAV2-4/rh.50, AAV2-5/rh.51, AAV3.1/hu.6, AAV3.1/hu.9, AAV3-9/rh.52, AAV3-11/rh.53, AAV4-8/r11.64, AAV4-9/rh.54, AAV4-19/rh.55, AAV5-3/rh.57, AAV5-22/rh.58, AAV7.3/hu.7, AAV16.8/hu.10, AAV16.12/hu.11, AAV29.3/bb.1, AAV29.5/bb.2, AAV106.1/hu.37, AAV114.3/hu.40, AAV127.2/hu.41, AAV127.5/hu.42, AAV128.3/hu.44, AAV130.4/hu.48, AAV145.1/hu.53, AAV145.5/hu.54, AAV145.6/hu.55, AAV161.10/hu.60, AAV161.6/hu.61, AAV33.12/hu.17, AAV33.4/hu.15, AAV33.8/hu.16, AAV52/hu.19, AAV52.1/hu.20, AAV58.2/hu.25, AAVA3.3, AAVA3.4, AAVA3.5, AAVA3.7, AAVC1, AAVC2, AAVC5, AAV-DJ, AAV-DJ8, AAVF3, AAVF5, AAVH2, AAVrh.72, AAVhu.8, AAVrh.68, AAVrh.70, AAVpi.1, AAVpi.3, AAVpi.2, AAVrh.60, AAVrh.44, AAVrh.65, AAVrh.55, AAVrh.47, AAVrh.69, AAVrh.45, AAVrh.59, AAVhu.12, AAVH6, AAVLK03, AAVH-1/hu.1, AAVH-5/hu.3, AAVLG-10/rh.40, AAVLG-4/rh.38, AAVLG-9/hu.39, AAVN721-8/rh.43, AAVCh.5, AAVCh.5R1, AAVcy.2, AAVcy.3, AAVcy.4, AAVcy.5, AAVCy.5R1, AAVCy.5R2, AAVCy.5R3, AAVCy.5R4, AAVcy.6, AAVhu.1, AAVhu.2, AAVhu.3, AAVhu.4, AAVhu.5, AAVhu.6, AAVhu.7, AAVhu.9, AAVhu.10, AAVhu.11, AAVhu.13, AAVhu.15, AAVhu.16, AAVhu.17, AAVhu.18, AAVhu.20, AAVhu.21, AAVhu.22, AAVhu.23.2, AAVhu.24, AAVhu.25, AAVhu.27, AAVhu.28, AAVhu.29, AAVhu.29R, AAVhu.31, AAVhu.32, AAVhu.34, AAVhu.35, AAVhu.37, AAVhu.39, AAVhu.40, AAVhu.41, AAVhu.42, AAVhu.43, AAVhu.44, AAVhu.44R1, AAVhu.44R2, AAVhu.44R3, AAVhu.45, AAVhu.46, AAVhu.47, AAVhu.48, AAVhu.48R1, AAVhu.48R2, AAVhu.48R3, AAVhu.49, AAVhu.51, AAVhu.52, AAVhu.54, AAVhu.55, AAVhu.56, AAVhu.57, AAVhu.58, AAVhu.60, AAVhu.61, AAVhu.63, AAVhu.64, AAVhu.66, AAVhu.67, AAVhu.14/9, AAVhu.t 19, AAVrh.2, AAVrh.2R, AAVrh.8, AAVrh.8R, AAVrh.10, AAVrh.12, AAVrh.13, AAVrh.13R, AAVrh.14, AAVrh.17, AAVrh.18, AAVrh.19, AAVrh.20, AAVrh.21, AAVrh.22, AAVrh.23, AAVrh.24, AAVrh.25, AAVrh.31, AAVrh.32, AAVrh.33, AAVrh.34, AAVrh.35, AAVrh.36, AAVrh.37, AAVrh.37R2, AAVrh.38, AAVrh.39, AAVrh.40, AAVrh.46, AAVrh.48, AAVrh.48.1, AAVrh.48.1.2, AAVrh.48.2, AAVrh.49, AAVrh.51, AAVrh.52, AAVrh.53, AAVrh.54, AAVrh.56, AAVrh.57, AAVrh.58, AAVrh.61, AAVrh.64, AAVrh.64R1, AAVrh.64R2, AAVrh.67, AAVrh.73, AAVrh.74, AAVrh8R, AAVrh8R A586R mutant, AAVrh8R R533A mutant, AAAV, BAAV, caprine AAV, bovine AAV, ovine AAV, AAVhE1.1, AAVhEr1.5, AAVhER1.14, AAVhEr1.8, AAVhEr1.16, AAVhEr1.18, AAVhEr1.35, AAVhEr1.7, AAVhEr1.36, AAVhEr2.29, AAVhEr2.4, AAVhEr2.16, AAVhEr2.30, AAVhEr2.31, AAVhEr2.36, AAVhER1.23, AAVhEr3.1, AAV2.5T, AAV-PAEC, AAV-LK01, AAV-LK02, AAV-LK03, AAV-LK04, AAV-LK05, AAV-LK06, AAV-LK07, AAV-LK08, AAV-LK09, AAV-LK10, AAV-LK11, AAV-LK12, AAV-LK13, AAV-LK14, AAV-LK15, AAV-LK16, AAV-LK17, AAV-LK18, AAV-LK19, AAV-PAEC2, AAV-PAEC4, AAV-PAEC6, AAV-PAEC7, AAV-PAEC8, AAV-PAEC11, AAV-PAEC12, AAV-2-pre-miRNA-101, AAV-8h, AAV-8b, AAV-h, AAV-b, AAV SM 10-2, AAV Shuffle 100-1, AAV Shuffle 100-3, AAV Shuffle 100-7, AAV Shuffle 10-2, AAV Shuffle 10-6, AAV Shuffle 10-8, AAV Shuffle 100-2, AAV SM 10-1, AAV SM 10-8, AAV SM 100-3, AAV SM 100-10, BNP61 AAV, BNP62 AAV, BNP63 AAV, AAVrh.50, AAVrh.43, AAVrh.62, AAVrh.48, AAVhu.19, AAVhu.11, AAVhu.53, AAV4-8/rh.64, AAVLG-9/hu.39, AAV54.5/hu.23, AAV54.2/hu.22, AAV54.7/hu.24, AAV54.1/hu.21, AAV54.4R/hu.27, AAV46.2/hu.28, AAV46.6/hu.29, AAV128.1/hu.43, true type AAV (ttAAV), UPENN AAV 10, Japanese AAV 10 serotypes, AAV CBr-7.1, AAV CBr-7.10, AAV CBr-7.2, AAV CBr-7.3, AAV CBr-7.4, AAV CBr-7.5, AAV CBr-7.7, AAV CBr-7.8, AAV CBr-B7.3, AAV CBr-B7.4, AAV CBr-E1, AAV CBr-E2, AAV CBr-E3, AAV CBr-E4, AAV CBr-E5, AAV CBr-e5, AAV CBr-E6, AAV CBr-E7, AAV CBr-E8, AAV CHt-1, AAV CHt-2, AAV CHt-3, AAV CHt-6.1, AAV CHt-6.10, AAV CHt-6.5, AAV CHt-6.6, AAV CHt-6.7, AAV CHt-6.8, AAV CHt-P1, AAV CHt-P2, AAV CHt-P5, AAV CHt-P6, AAV CHt-P8, AAV CHt-P9, AAV CKd-1, AAV CKd-10, AAV CKd-2, AAV CKd-3, AAV CKd-4, AAV CKd-6, AAV CKd-7, AAV CKd-8, AAV CKd-B1, AAV CKd-B2, AAV CKd-B3, AAV CKd-B4, AAV CKd-B5, AAV CKd-B6, AAV CKd-B7, AAV CKd-B8, AAV CKd-H1, AAV CKd-H2, AAV CKd-H3, AAV CKd-H4, AAV CKd-H5, AAV CKd-H6, AAV CKd-N3, AAV CKd-N4, AAV CKd-N9, AAV CLg-F1, AAV CLg-F2, AAV CLg-F3, AAV CLg-F4, AAV CLg-F5, AAV CLg-F6, AAV CLg-F7, AAV CLg-F8, AAV CLv-1, AAV CLv1-1, AAV Clv1-10, AAV CLv1-2, AAV CLv-12, AAV CLv1-3, AAV CLv-13, AAV CLv1-4, AAV Clv1-7, AAV Clv1-8, AAV Clv1-9, AAV CLv-2, AAV CLv-3, AAV CLv-4, AAV CLv-6, AAV CLv-8, AAV CLv-D1, AAV CLv-D2, AAV CLv-D3, AAV CLv-D4, AAV CLv-D5, AAV CLv-D6, AAV CLv-D7, AAV CLv-D8, AAV CLv-E1, AAV CLv-K1, AAV CLv-K3, AAV CLv-K6, AAV CLv-L4, AAV CLv-L5, AAV CLv-L6, AAV CLv-M1, AAV CLv-M11, AAV CLv-M2, AAV CLv-M5, AAV CLv-M6, AAV CLv-M7, AAV CLv-M8, AAV CLv-M9, AAV CLv-R1, AAV CLv-R2, AAV CLv-R3, AAV CLv-R4, AAV CLv-R5, AAV CLv-R6, AAV CLv-R7, AAV CLv-R8, AAV CLv-R9, AAV CSp-1, AAV CSp-10, AAV CSp-11, AAV CSp-2, AAV CSp-3, AAV CSp-4, AAV CSp-6, AAV CSp-7, AAV CSp-8, AAV CSp-8.10, AAV CSp-8.2, AAV CSp-8.4, AAV CSp-8.5, AAV CSp-8.6, AAV CSp-8.7, AAV CSp-8.8, AAV CSp-8.9, AAV CSp-9, AAV.hu.48R3, AAV.VR-355, AAV3B, AAV4, AAV5, AAVF1/HSC1, AAVF11/HSC11, AAVF12/HSC12, AAVF13/HSC13, AAVF14/HSC14, AAVF15/HSC15, AAVF16/HSC16, AAVF17/HSC17, AAVF2/HSC2, AAVF3/HSC3, AAVF4/HSC4, AAVF5/HSC5, AAVF6/HSC6, AAVF7/HSC7, AAVF8/HSC8, AAVF9/HSC9, PHP.B (AAV-PHP.B), PHP.A (AAV.PHP.A), G2B-26, G2B-13, TH1.1-32, TH1.1-35, AAVPHP.B2, AAVPHP.B3, AAVPHP.N/PHP.B-DGT, AAVPHP.B-EST, AAVPHP.B-GGT, AAVPHP.B-ATP, AAVPHP.B-ATT-T, AAVPHP.B-DGT-T, AAVPHP.B-GGT-T, AAVPHP.B-SGS, AAVPHP.B-AQP, AAVPHP.B-QQP, AAVPHP.B-SNP(3), AAVPHP.B-SNP, AAVPHP.B-QGT, AAVPHP.B-NQT, AAVPHP.B-EGS, AAVPHP.B-SGN, AAVPHP.B-EGT, AAVPHP.B-DST, AAVPHP.B-DST, AAVPHP.B-STP, AAVPHP.B-PQP, AAVPHP.B-SQP, AAVPHP.B-QLP, AAVPHP.B-TMP, AAVPHP.B-TTP, AAVPHP.S/G2A12, AAVG2A15/G2A3, AAVG2B4, and/or AAVG2B5, and variants thereof.

[0174] In some embodiments, an AAV particle of the present disclosure may comprise a capsid protein having the amino acid sequence, or encoded by a nucleotide sequence, of any one of SEQ ID NOs: 1-875, 992-1374, and 1775-1777, or a functional variant thereof, e.g., a capsid protein variant comprising a sequence substantially identical to, and capable of at least one activity of, a wild-type capsid protein.

[0175] In some exemplary embodiments, a modified AAV2 serotype or nucleic acid encoding the serotype (e.g, a codon optimized nucleic acid) may be used. In some embodiments, a nucleic acid encoding an AAV2 serotype is modified to remove one or more false translation start sites. In some embodiments, a nucleic acid encoding an AAV2 serotype is modified to comprise a suboptimal start codon. In some embodiments, the nucleic acid sequence encoding the modified AAV2 serotype comprises SEQ ID NO: 1778. In certain embodiments, the AAV serotype comprises a capsid nucleic acid sequence of SEQ ID NO: 15. In certain embodiments, the AAV serotype comprises a capsid nucleic acid sequence of SEQ ID NO: 1778. In some embodiments, the AAV serotype comprises a capsid amino acid sequence of SEQ ID NO: 16. In some embodiments, the AAV serotype may be, or have, a mutation over a wild type or naturally-occurring sequence, e.g., as described in U.S. Pat. No. 9,546,112, the contents of which are herein incorporated by reference in their entirety.

[0176] In any of the DNA and RNA sequences referenced and/or described herein, the single letter symbol has the following description: A for adenine; C for cytosine; G for guanine; T for thymine; U for Uracil; W for weak bases such as adenine or thymine; S for strong nucleotides such as cytosine and guanine; M for amino nucleotides such as adenine and cytosine; K for keto nucleotides such as guanine and thymine; R for purines adenine and guanine; Y for pyrimidine cytosine and thymine; B for any base that is not A (e.g., cytosine, guanine, and thymine); D for any base that is not C (e.g., adenine, guanine, and thymine); H for any base that is not G (e.g., adenine, cytosine, and thymine); V for any base that is not T (e.g., adenine, cytosine, and guanine); N for any nucleotide (which is not a gap); and Z is for zero.

[0177] In any of the amino acid sequences referenced and/or described herein, the single letter symbol has the following description: G (Gly) for Glycine; A (Ala) for Alanine; L (Leu) for Leucine; M (Met) for Methionine; F (Phe) for Phenylalanine; W (Trp) for Tryptophan; K (Lys) for Lysine; Q (Gln) for Glutamine; E (Glu) for Glutamic Acid; S (Ser) for Serine; P (Pro) for Proline; V (Val) for Valine; I (Ile) for Isoleucine; C (Cys) for Cysteine; Y (Tyr) for Tyrosine; H (His) for Histidine; R (Arg) for Arginine; N (Asn) for Asparagine; D (Asp) for Aspartic Acid; T (Thr) for Threonine; B (Asx) for Aspartic acid or Asparagine; J (Xle) for Leucine or Isoleucine; 0 (Pyl) for Pyrrolysine; U (Sec) for Selenocysteine; X (Xaa) for any amino acid; and Z (Glx) for Glutamine or Glutamic acid.

[0178] In certain embodiments, the AAV serotype may be, or may comprise a sequence as described in International Patent Publication WO2015038958, the contents of which are herein incorporated by reference in their entirety, such as, but not limited to, AAV9 (SEQ ID NO: 2 and 11 of WO2015038958 or SEQ ID NO: 132 and 131 respectively herein), PHP.B (SEQ ID NO: 8 and 9 of WO2015038958 or SEQ ID NO: 1 and 2 herein), G2B-13 (SEQ ID NO: 12 of WO2015038958 or SEQ ID NO: 3 herein), G2B-26 (SEQ ID NO: 13 of WO2015038958 or SEQ ID NO: 1 herein), TH1.1-32 (SEQ ID NO: 14 of WO2015038958 or SEQ ID NO: 4 herein), TH1.1-35 (SEQ ID NO: 15 of WO2015038958 or SEQ ID NO: 5 herein) or variants thereof. Further, any of the targeting peptides or amino acid inserts described in WO2015038958, may be inserted into any parent AAV serotype, such as, but not limited to, AAV9 (SEQ ID NO: 131 for the DNA sequence and SEQ ID NO: 132 for the amino acid sequence). In certain embodiments, the amino acid insert is inserted between amino acids 586-592 of the parent AAV (e.g., AAV9). In another embodiment, the amino acid insert is inserted between amino acids 588-589 of the parent AAV sequence.

[0179] In certain embodiments, the AAV serotype may be, or may have a sequence as described in International Patent Publication WO2017100671, the contents of which are herein incorporated by reference in their entirety, such as, but not limited to, AAV9 (SEQ ID NO: 45 of WO2017100671, herein SEQ ID NO: 875), PHP.N (SEQ ID NO: 46 of WO2017100671, herein SEQ ID NO: 873), PHP.S (SEQ ID NO: 47 of WO2017100671, herein SEQ ID NO: 874), or variants thereof. Further, any of the targeting peptides or amino acid inserts described in WO2017100671 may be inserted into any parent AAV serotype, such as, but not limited to, AAV9 (SEQ ID NO: 127 or SEQ ID NO: 875). In certain embodiments, the amino acid insert is inserted between amino acids 586-592 of the parent AAV (e.g., AAV9). In another embodiment, the amino acid insert is inserted between amino acids 588-589 of the parent AAV sequence.

[0180] In certain embodiments, the AAV serotype may be, or may have a sequence as described in U.S. Pat. No. 9,624,274, the contents of which are herein incorporated by reference in their entirety, such as, but not limited to, AAV2 (SEQ ID NO: 183 of U.S. Pat. No. 9,624,274), Further, any of the structural protein inserts described in U.S. Pat. No. 9,624,274, may be inserted into, but not limited to, I-453 and I-587 of any parent AAV serotype, such as, but not limited to, AAV2 (SEQ ID NO: 183 of U.S. Pat. No. 9,624,274).

[0181] In certain embodiments, the AAV serotype may be, or may have a sequence as described in U.S. Pat. No. 9,475,845, the contents of which are herein incorporated by reference in their entirety, such as, but not limited to, AAV capsid proteins comprising modification of one or more amino acids at amino acid positions 585 to 590 of the native AAV2 capsid protein. In certain embodiments, the amino acid modification is a substitution at amino acid positions 262 through 265 in the native AAV2 capsid protein or the corresponding position in the capsid protein of another AAV with a targeting sequence.

[0182] In certain embodiments, the AAV serotype may be, or may comprise a sequence as described in United States Publication No. US 20160369298, the contents of which are herein incorporated by reference in their entirety, such as, but not limited to, site-specific mutated capsid protein of AAV2 (SEQ ID NO: 97 of US 20160369298; herein SEQ ID NO: 1560) or variants thereof, wherein the specific site is at least one site selected from sites R447, G453, S578, N587, N587+1, S662 of VP1 or fragment thereof.

[0183] In some embodiments, the AAV serotype may be modified as described in the United States Publication US 20170145405 the contents of which are herein incorporated by reference in their entirety. AAV serotypes may include, but is not limited to, modified AAV2 (e.g., modifications at Y444F, Y500F, Y730F and/or S662V).

[0184] In some embodiments, the AAV serotype may be modified as described in the International Publication WO2017083722 the contents of which are herein incorporated by reference in their entirety. AAV serotypes may include, but are not limited to, AAV2 (Y444+500+730F+T491V).

[0185] In some embodiments, the AAV serotype is PHP.N. In certain embodiments, the AAV serotype is a serotype comprising the AAVPHP.N (PHP.N) peptide, or a variant thereof. In certain embodiments the AAV serotypes is a serotype comprising the AAVPHP.B (PHP.B) peptide, or a variant thereof. In certain embodiments, the AAV serotype is a serotype comprising the AAVPHP.A (PHP.A) peptide, or a variant thereof. In certain embodiments, the AAV serotype is a serotype comprising the PHP.S peptide, or a variant thereof. In certain embodiments, the AAV serotype is a serotype comprising the PHP.B2 peptide, or a variant thereof. In certain embodiments, the AAV serotype is a serotype comprising the PHP.B3 peptide, or a variant thereof. In certain embodiments, the AAV serotype is a serotype comprising the G2B4 peptide, or a variant thereof. In certain embodiments, the AAV serotype is a serotype comprising the G2B5 peptide, or a variant thereof. In certain embodiments the AAV capsid is one that allows for blood brain barrier penetration following intravenous administration.

[0186] In certain embodiments, the AAV serotype may comprise a capsid amino acid sequence with 50%, 51%, 52%, 53%, 54%, 55%, 56%, 57%, 58%, 59%, 60%, 61%, 62%, 63%, 64%, 65%, 66%, 67%, 68%, 69%, 70%, 71%, 72%, 73%, 74%, 75%, 76%, 77%, 78%, 79%, 80%, 81%, 82%, 83%, 84%, 85%, 86%, 87%, 88%, 89%, 90%, 91%, 92%, 93%, 94%, 95%, 96%, 97%, 98%, 99%, or 100% identity to any of the those described above. In certain embodiments, the AAV serotype comprises a capsid amino acid sequence at least 95% identical to SEQ ID NO: 16. In certain embodiments, the AAV serotype comprises a capsid amino acid sequence at least 99% identical to SEQ ID NO: 16. In certain embodiments, the AAV serotype comprises a capsid amino acid of SEQ ID NO: 16.

[0187] In certain embodiments, the AAV serotype may comprise a capsid nucleic acid sequence with 50%, 51%, 52%, 53%, 54%, 55%, 56%, 57%, 58%, 59%, 60%, 61%, 62%, 63%, 64%, 65%, 66%, 67%, 68%, 69%, 70%, 71%, 72%, 73%, 74%, 75%, 76%, 77%, 78%, 79%, 80%, 81%, 82%, 83%, 84%, 85%, 86%, 87%, 88%, 89%, 90%, 91%, 92%, 93%, 94%, 95%, 96%, 97%, 98%, 99%, or 100% identity to any of the those described above. In certain embodiments, the AAV serotype comprises a capsid nucleic acid sequence at least 90% identical to SEQ ID NO: 15. In certain embodiments, the AAV serotype comprises a capsid nucleic acid sequence at least 95% identical to SEQ ID NO: 15. In certain embodiments, the AAV serotype comprises a capsid nucleic acid sequence at least 99% identical to SEQ ID NO: 15. In certain embodiments, the AAV serotype comprises a capsid nucleic acid sequence of SEQ ID NO: 15. In certain embodiments, the AAV serotype comprises a capsid nucleic acid sequence of SEQ ID NO: 1778.

[0188] In some embodiments, the AAV serotype comprises AAV2. In some embodiments, the AAV serotype is AAV2. In certain embodiments, the AAV serotype comprises a capsid nucleic acid sequence of SEQ ID NO: 1778. In some embodiments, the AAV serotype comprises a capsid amino acid sequence of SEQ ID NO: 16.

[0189] In certain embodiments, the initiation codon for translation of the AAV VP1 capsid protein may be CTG, TTG, or GTG as described in U.S. Pat. No. 8,163,543, the contents of which are herein incorporated by reference in its entirety.

[0190] The present disclosure refers to structural capsid proteins (including VP1, VP2 and VP3) which are encoded by capsid (Cap) genes. These capsid proteins form an outer protein structural shell (i.e. capsid) of a viral vector such as AAV. VP capsid proteins synthesized from Cap polynucleotides generally include a methionine as the first amino acid in the peptide sequence (Met1), which is associated with the start codon (AUG or ATG) in the corresponding Cap nucleotide sequence. However, it is common for a first-methionine (Met1) residue or generally any first amino acid (AA1) to be cleaved off after or during polypeptide synthesis by protein processing enzymes such as Met-aminopeptidases. This “Met/AA-clipping” process often correlates with a corresponding acetylation of the second amino acid in the polypeptide sequence (e.g., alanine, valine, serine, threonine, etc.). Met-clipping commonly occurs with VP1 and VP3 capsid proteins but can also occur with VP2 capsid proteins. In some embodiments, the AAV particles described herein comprise an AAV2 capsid wherein a first amino acid residue of VP1 has been clipped.

[0191] Where the Met/AA-clipping is incomplete, a mixture of one or more (one, two or three) VP capsid proteins comprising the viral capsid may be produced, some of which may include a Met1/AA1 amino acid (Met+/AA+) and some of which may lack a Met1/AA1 amino acid as a result of Met/AA-clipping (Met−/AA−). For further discussion regarding Met/AA-clipping in capsid proteins, see Jin, et al. Direct Liquid Chromatography/Mass Spectrometry Analysis for Complete Characterization of Recombinant Adeno-Associated Virus Capsid Proteins. Hum Gene Ther Methods. 2017 Oct. 28(5):255-267; Hwang, et al. N-Terminal Acetylation of Cellular Proteins Creates Specific Degradation Signals. Science. 2010 Feb. 19. 327(5968): 973-977; the contents of which are each incorporated herein by reference in its entirety.

[0192] According to the present invention, references to capsid proteins is not limited to either clipped (Met−/AA−) or unclipped (Met+/AA+) and may, in context, refer to independent capsid proteins, viral capsids comprised of a mixture of capsid proteins, and/or polynucleotide sequences (or fragments thereof) which encode, describe, produce or result in capsid proteins of the present disclosure. A direct reference to a “capsid protein” or “capsid polypeptide” (such as VP1, VP2 or VP2) may also comprise VP capsid proteins which include a Met1/AA1 amino acid (Met+/AA+) as well as corresponding VP capsid proteins which lack the Met1/AA1 amino acid as a result of Met/AA-clipping (Met−/AA−).

[0193] Further according to the present disclosure, a reference to a specific SEQ ID NO (whether a protein or nucleic acid) which comprises or encodes, respectively, one or more capsid proteins which include a Met1/AA1 amino acid (Met+/AA+) should be understood to teach the VP capsid proteins which lack the Met1/AA1 amino acid as upon review of the sequence, it is readily apparent any sequence which merely lacks the first listed amino acid (whether or not Met1/AA1).

[0194] In certain embodiments, reference to a VP1 polypeptide sequence which is 736 amino acids in length and which includes a “Met1” amino acid (Met+) encoded by the AUG/ATG start codon may also be understood to teach a VP1 polypeptide sequence which is 735 amino acids in length and which does not include the “Met1” amino acid (Met−) of the 736 amino acid Met+ sequence. As a second non-limiting example, reference to a VP1 polypeptide sequence which is 736 amino acids in length and which includes an “AA1” amino acid (AA1+) encoded by any NNN initiator codon may also be understood to teach a VP1 polypeptide sequence which is 735 amino acids in length and which does not include the “AA1” amino acid (AA1−) of the 736 amino acid AA1+ sequence.

[0195] References to viral capsids formed from VP capsid proteins (such as reference to specific AAV capsid serotypes), can incorporate VP capsid proteins which include a Met1/AA1 amino acid (Met+/AA1+), corresponding VP capsid proteins which lack the Met1/AA1 amino acid as a result of Met/AA1−clipping (Met−/AA1−), and combinations thereof (Met+/AA1+ and Met−/AA1−).

[0196] In certain embodiments, an AAV capsid serotype can include VP1 (Met+/AA1+), VP1 (Met−/AA1−), or a combination of VP1 (Met+/AA1+) and VP1 (Met−/AA1−). An AAV capsid serotype can also include VP3 (Met+/AA1+), VP3 (Met−/AA1−), or a combination of VP3 (Met+/AA1+) and VP3 (Met−/AA1−); and can also include similar optional combinations of VP2 (Met+/AA1) and VP2 (Met−/AA1−).

### Payloads

[0197] AAV particles of the present disclosure can comprise, or be produced using, at least one payload construct which comprises at least one payload region. In certain embodiments, the payload region may be located within a viral genome, such as the viral genome of a payload construct. At the 5′ and/or the 3′ end of the payload region there may be at least one inverted terminal repeat (ITR). Within the payload region, there may be additional elements as discussed above, e.g., a promoter region, an intron region, and a coding region.

[0198] In certain embodiments, a payload construct of the present disclosure can be a bacmid, also known as a baculovirus plasmid or recombinant baculovirus genome. As used herein, “payloadBac” refers to a baculovirus comprising a payload construct and/or region, e.g., a payload construct and/or region encoding AADC or a functional variant thereof. Viral production cells (e.g., Sf9 cells) may be transfected with payloadBacs and/or with BIICs comprising payloadBacs.

[0199] In certain embodiments, the payload region of the AAV particle comprises one or more nucleic acid sequences encoding a polypeptide or protein of interest.

[0200] In certain embodiments, the AAV particle comprises a viral genome with a payload region comprising nucleic acid sequences encoding more than one polypeptide of interest. In certain embodiments, a viral genome encoding one or more polypeptides may be replicated and packaged into a viral particle. A target cell transduced with a viral particle comprising the vector genome may express each of the one or more polypeptides in the single target cell.

[0201] Where the AAV particle payload region encodes a polypeptide, the polypeptide may be a peptide, polypeptide or protein. As a non-limiting example, the payload region may encode at least one therapeutic protein of interest. The AAV viral genomes encoding polypeptides described herein may be useful in the fields of human disease, viruses, infections veterinary applications and a variety of in vivo and in vitro settings.

[0202] In certain embodiments, administration of the formulated AAV particles (which comprise the viral genome) to a subject will increase the expression of a protein in a subject. In certain embodiments, the increase of the expression of the protein will reduce the effects and/or symptoms of a disease or ailment associated with the polypeptide encoded by the payload.

[0203] In certain embodiments, the AAV particle comprises a viral genome with a payload region comprising a nucleic acid sequence encoding a protein of interest (i.e., a payload protein, therapeutic protein, e.g., AADC or a functional variant thereof).

[0204] In certain embodiments, the payload region comprises a nucleic acid sequence encoding AADC (e.g., SEQ ID NO: 978). In certain embodiments, the payload region comprises SEQ ID NO: 979.

[0205] In certain embodiments, the payload region comprises a nucleic acid sequence a therapeutic protein, an enzyme, an antibody or antigen-binding fragment thereof, a protein ligand, or a soluble receptor. In certain embodiments, the payload region comprises a nucleic acid sequence encoding a modulatory polynucleotide which interferes with a target gene expression and/or a target protein production. In certain embodiments, the modulatory polynucleotide is an antisense strand, a miRNA molecule, or a siRNA molecule.

[0206] In certain embodiments, the payload region comprises a nucleic acid sequence encoding a protein comprising but not limited to an antibody or antigen binding fragment thereof, an enzyme, ApoE2, Frataxin, survival motor neuron (SMN) protein, glucocerebrosidase, N-sulfoglucosamine sulfohydrolase, N-acetyl-alpha-glucosaminidase, iduronate 2-sulfatase, alpha-L-iduronidase, palmitoyl-protein thioesterase 1, tripeptidyl peptidase 1, battenin, CLN5, CLN6 (linclin), MFSD8, CLN8, aspartoacylase (ASPA), progranulin (GRN), MeCP2, beta-galactosidase (GLB1) and/or gigaxonin (GAN).

[0207] In certain embodiments, the payload region comprises a nucleic acid sequence encoding a modulatory polynucleotide which interferes with a target gene expression and/or a target protein production, e.g., an antisense or a siRNA molecule. In certain embodiments, the gene expression or protein production to be inhibited/modified may comprise but are not limited to superoxide dismutase 1 (SOD1), chromosome 9 open reading frame 72 (C90RF72), TAR DNA binding protein (TARDBP), ataxin-3 (ATXN3), huntingtin (HTT), amyloid precursor protein (APP), apolipoprotein E (ApoE), microtubule-associated protein tau (MAPT), alpha-synuclein (SNCA), voltage-gated sodium channel alpha subunit 9 (SCN9A), and/or voltage-gated sodium channel alpha subunit 10 (SCN10A).

[0208] In certain embodiments, a nucleic acid sequence encoding such siRNA molecules, or a single strand of the siRNA molecules, is inserted into adeno-associated viral vectors and introduced into cells, specifically cells in the central nervous system.

[0209] In certain embodiments, the encoded siRNA duplex of the present disclosure contains an antisense strand and a sense strand hybridized together forming a duplex structure, wherein the antisense strand is complementary to the nucleic acid sequence of the targeted gene of interest, and wherein the sense strand is homologous to the nucleic acid sequence of the targeted gene of interest. In other aspects, there are 0, 1 or 2 nucleotide overhangs at the 3′end of each strand.

[0210] The payloads of the formulated AAV particles of the present disclosure may encode one or more agents which are subject to RNA interference (RNAi) induced inhibition of gene expression. In certain embodiments, the AAV particles of the present disclosure may encoded siRNA duplexes or encoded dsRNA that target a gene of interest (referred to herein collectively as “siRNA molecules”). Such siRNA molecules, e.g., encoded siRNA duplexes, encoded dsRNA or encoded siRNA or dsRNA precursors can reduce or silence gene expression in cells, for example, astrocytes or microglia, cortical, hippocampal, entorhinal, thalamic, sensory or motor neurons.

[0211] In certain embodiments, the siRNA molecules may be encoded in a modulatory polynucleotide which also comprises a molecular scaffold. As used herein a “molecular scaffold” is a framework or starting molecule that forms the sequence or structural basis against which to design or make a subsequent molecule.

[0212] In certain embodiments, the modulatory polynucleotide which comprises the payload (e.g., siRNA, miRNA or other RNAi agent described herein) comprises molecular scaffold which comprises a leading 5′ flanking sequence which may be of any length and may be derived in whole or in part from wild type microRNA sequence or be completely artificial. A 3′ flanking sequence may mirror the 5′ flanking sequence in size and origin. In certain embodiments, one or both of the 5′ and 3′ flanking sequences are absent.

[0213] In certain embodiments, the molecular scaffold may comprise one or more linkers known in the art. The linkers may separate regions or one molecular scaffold from another. As a non-limiting example, the molecular scaffold may be polycistronic.

[0214] In certain embodiments, the modulatory polynucleotide is designed using at least one of the following properties: loop variant, seed mismatch/bulge/wobble variant, stem mismatch, loop variant and basal stem mismatch variant, seed mismatch and basal stem mismatch variant, stem mismatch and basal stem mismatch variant, seed wobble and basal stem wobble variant, or a stem sequence variant.

[0215] In certain embodiments, the present disclosure provides methods for producing an AAV for inhibiting/silencing gene expression in a cell. In certain embodiments, the AAV comprises siRNA duplexes that may be used to reduce the expression of a gene of interest and/or transcribed mRNA in at least one region of the CNS. In certain embodiments, the present disclosure provides methods for manufacturing a pharmaceutical composition comprising at least one siRNA duplex targeting the gene of interest and a pharmaceutically acceptable carrier. The term “targeting” as used in this context refers to the process of design and selection of a nucleic acid sequence that will hybridize to a target nucleic acid and induce a desired effect. In some embodiments, the siRNA duplex is encoded by a vector genome in an AAV particle.

### II. AAV Production

### General Viral Production Process

[0216] Mammalian cells and/or insect cells are often used as viral production cells for the production of rAAV particles. In various embodiments, the methods and systems disclosed herein employ insect cells, e.g., Sf9 cells, e.g., to produce AAV2 serotype particles, e.g., those comprising an AADC payload construct.

[0217] In various embodiments, the present disclosure provides methods of producing AAV particles or viral vectors by (a) contacting a viral production cell (e.g., Sf9) with one or more viral expression constructs encoding at least one AAV capsid protein and/or at least one AAV replication protein, and one or more payload construct vectors, e.g., wherein said payload construct vector comprises a payload construct encoding AADC or a functional variant thereof; (b) culturing said viral production cell under conditions such that at least one AAV particle or viral vector is produced, and (c) isolating said at least one AAV particle or viral vector. The viral expression constructs may be comprised in one or more baculovirus (expressionBac). The expressionBacs may be comprised in one or more BIIC (e.g., expressionBIICs). The payload constructs may be comprised one or more baculovirus (payloadBac). The payloadBacs may be comprised in one or more BIICs (e.g., payloadBIICs or payload BIICs).

[0218] In these methods a viral expression construct may encode at least one structural protein and/or at least one non-structural protein. The structural protein may comprise any of the native or wild type capsid proteins VP1, VP2 and/or VP3 or a chimeric protein. The non-structural protein may comprise any of the native or wild type Rep78, Rep68, Rep52 and/or Rep40 proteins or a chimeric protein, e.g., any of the construct described above.

[0219] In certain embodiments, an rAAV production method as disclosed herein comprises transient transfection, viral transduction and/or electroporation.

[0220] In certain embodiments, the viral production cell is selected from the group consisting of a mammalian cell and an insect cell. In certain embodiments, the insect cell comprises a Spodoptera frugiperda insect cell. In certain embodiments, the insect cell comprises a Sf9 insect cell. In certain embodiments, the insect cell comprises a Sf21 insect cell.

[0221] Also provided are AAV particles and viral vectors produced according to the methods described herein.

[0222] The AAV particles of the present disclosure may be formulated as a pharmaceutical composition with one or more acceptable excipients.

[0223] In certain embodiments, an AAV particle or viral vector may be produced by a method described herein.

[0224] In certain embodiments, the AAV particles may be produced by contacting a viral production cell (e.g., an insect cell) with at least one viral expression construct encoding at least one capsid protein and at least one AAV replication protein, and at least one payload construct vector. In some embodiments, separate constructs encoding the at least one capsid protein and at least one AAV replication protein may be used. The viral production cell may be contacted by transient transfection, viral transduction and/or electroporation. The payload construct vector may comprise a payload construct encoding a payload molecule such as AADC. The viral production cell can be cultured under conditions such that at least one AAV particle or viral vector is produced, isolated (e.g., using temperature-induced lysis, mechanical lysis and/or chemical lysis) and/or purified (e.g., using filtration, chromatography and/or immunoaffinity purification).

[0225] In certain embodiments, the AAV particles are produced in an insect cell (e.g., Spodoptera frugiperda (Sf9) cell) using the method described herein. As a non-limiting example, the insect cell is contacted using viral transduction which may comprise baculoviral transduction.

[0226] In certain embodiments, the viral expression construct may encode at least one structural protein and at least one non-structural protein. As a non-limiting example, the structural protein may comprise capsid VP1, VP2 and/or VP3. As another non-limiting example, the non-structural protein may comprise Rep78, Rep68, Rep52 and/or Rep40.

[0227] In certain embodiments, the AAV particle production method described herein produces greater than 10¹, greater than 10², greater than 10³, greater than 10⁴ or greater than 10⁵ AAV particles in a viral production cell.

[0228] In certain embodiments, a process of the present disclosure comprises production of viral particles in a viral production cell using a viral production system which comprises at least one viral expression construct and at least one payload construct. The at least one viral expression construct and at least one payload construct can be co-transfected (e.g., dual transfection, triple transfection) into a viral production cell. The transfection is completed using standard molecular biology techniques known and routinely performed by a person skilled in the art. The viral production cell provides the cellular machinery necessary for expression of the proteins and other biomaterials necessary for producing the AAV particles, comprising Rep proteins which replicate the payload construct and Cap proteins which assemble to form a capsid that encloses the replicated payload constructs. The resulting AAV particle is extracted from the viral production cells and processed into a pharmaceutical preparation for administration.

[0229] In certain embodiments, the process for production of viral particles utilizes seed cultures of viral production cells that comprise one or more baculoviruses (e.g., a Baculoviral Expression Vector (BEV) or baculovirus infected insect cells (BIICs) that have been transfected with a viral expression construct (e.g., comprised in an expressionBac) and a payload construct (e.g., comprised in a payloadBac)). In certain embodiments, the seed cultures are harvested, divided into aliquots and frozen, and may be used at a later time point to initiate an infection of a naïve population of production cells.

[0230] Large scale production of AAV particles may utilize a bioreactor. The use of a bioreactor allows for the precise measurement and/or control of variables that support the growth and activity of viral production cells such as mass, temperature, mixing conditions (impellor RPM or wave oscillation), CO₂ concentration, O₂ concentration, gas sparge rates and volumes, gas overlay rates and volumes, pH, Viable Cell Density (VCD), cell viability, cell diameter, and/or optical density (OD). In certain embodiments, the bioreactor is used for batch production in which the entire culture is harvested at an experimentally determined time point and AAV particles are purified. In another embodiment, the bioreactor is used for continuous production in which a portion of the culture is harvested at an experimentally determined time point for purification of AAV particles, and the remaining culture in the bioreactor is refreshed with additional growth media components.

[0231] AAV viral particles may be extracted from viral production cells in a process which comprises cell lysis, clarification, sterilization and purification. Cell lysis comprises any process that disrupts the structure of the viral production cell, thereby releasing AAV particles. In certain embodiments cell lysis may comprise thermal shock, chemical, or mechanical lysis methods. In some embodiments, cell lysis is done chemically. Clarification of the lysed cells can comprise the gross purification of the mixture of lysed cells, media components, and AAV particles. In certain embodiments, clarification comprises centrifugation and/or filtration, comprising but not limited to depth end, tangential flow, and/or hollow fiber filtration.

[0232] The end result of viral production is a purified collection of AAV particles which comprise two components: (1) a payload construct (e.g., a recombinant viral genome construct comprising a sequence encoding AADC or a functional variant thereof) and (2) a viral capsid.

[0233] In certain embodiments, such as the embodiment presented in FIG. 1, a viral production process of the present disclosure comprises steps for producing baculovirus infected insect cells (BIICs) using Viral Production Cells (VPC) and plasmid constructs. Viral Production Cells (VPCs) from a Cell Bank (CB) are thawed and expanded to provide a target working volume and VPC concentration. The resulting pool of VPCs is split into a Rep/Cap VPC pool and a Payload VPC pool. One or more Rep/Cap plasmid constructs (viral expression constructs) are processed into Rep/Cap Bacmid polynucleotides and transfected into the Rep/Cap VPC pool. One or more Payload plasmid constructs (payload constructs) are processed into Payload Bacmid polynucleotides and transfected into the Payload VPC pool. The two VPC pools are incubated to produce P1 Rep/Cap Baculoviral Expression Vectors (BEVs) and P1 Payload BEVs. The two BEV pools are expanded into a collection of Plaques, with a single Plaque being selected for Clonal Plaque (CP) Purification (also referred to as Single Plaque Expansion). The process can comprise a single CP Purification step or can comprise multiple CP Purification steps either in series or separated by other processing steps. The one-or-more CP Purification steps provide a CP Rep/Cap BEV pool and a CP Payload BEV pool. These two BEV pools can then be stored and used for future production steps, or they can be then transfected into VPCs to produce a Rep/Cap BIIC pool and a Payload BIIC pool.

[0234] In certain embodiments, such as the embodiment presented in FIG. 2, a viral production process of the present disclosure comprises steps for producing AAV particles using Viral Production Cells (VPC) and baculovirus infected insect cells (BIICs). Viral Production Cells (VPCs) from a Cell Bank (CB) are thawed and expanded to provide a target working volume and VPC concentration. The working volume of Viral Production Cells is seeded into a Production Bioreactor and can be further expanded to a working volume of 200-2000 L with a target VPC concentration for BIIC infection. The working volume of VPCs in the Production Bioreactor is then co-infected with Rep/Cap BIICs (“expressionBIICs”) and Payload BIICs (“payloadBIICs”), e.g., with a target VPC:BIIC ratio (e.g., a target VPC:expressionBIIC ratio and/or a target VPC:payloadBIIC ratio) and a target BIIC^{Rep/Cap}:BIIC^{Payload} (expressionBIIC:payloadBIIC) ratio. VCD infection can also utilize BEVs. The co-infected VPCs are incubated and expanded in the Production Bioreactor to produce a bulk harvest of AAV particles and VPCs.

[0235] In certain embodiments, such as the embodiment presented in FIG. 3, a viral production process of the present disclosure comprises steps for producing a Drug Substance by processing, clarifying and purifying a bulk harvest of AAV particles and Viral Production Cells. A bulk harvest of AAV particles and VPCs (within a Production Bioreactor) are processed through cellular disruption and lysis (e.g., chemical lysis and/or mechanical lysis), followed by nuclease treatment of the lysis pool, thereby producing a crude lysate pool. The crude lysate pool is processed through one or more filtration and clarification steps, comprising depth filtration and microfiltration to provide a clarified lysate pool. The clarified lysate pool is processed through one or more chromatography and purification steps, comprising affinity chromatography (AFC) and ion-exchange chromatography (AEX or CEX) to provide a purified product pool. The purified product pool is then optionally processed through nanofiltration, and then through tangential flow filtration (TFF). The TFF process comprises one or more diafiltration (DF) steps and one or more ultrafiltration (UF) steps, either in series or alternating. The product pool is further processed through viral retention filtration (VRF) and another filtration step to provide a drug substance pool. The drug substance pool can be further filtered, then aliquoted into vials for storage and treatment. The drug substance may be aliquoted into vials or extractable from the vials at a volume of about 0.5-2.5 mL. For example, in some embodiments, the drug substance pool can be aliquoted at volumes of about 1.2 mL into individual vials for storage, e.g., such that about 1.0 mL of the drug substance is extractable for treatment. In some embodiments, the drug substance pool can be aliquoted at volumes of about 1.8 mL into individual vials for storage, e.g., such that about 1.6 mL of the drug substance is extractable for treatment. In some embodiments, the vials are stored at ≤65° C.

### Viral Expression Constructs

[0236] The viral production system of the present disclosure comprises one or more viral expression constructs which can be transfected/transduced into a viral production cell. In certain embodiments, a viral expression construct or a payload construct of the present disclosure can be a bacmid, also known as a baculovirus plasmid or recombinant baculovirus genome. In certain embodiments, the viral expression comprises a protein-coding nucleotide sequence and at least one expression control sequence for expression in a viral production cell. In certain embodiments, the viral expression comprises a protein-coding nucleotide sequence operably linked to least one expression control sequence for expression in a viral production cell. In certain embodiments, the viral expression construct contains parvoviral genes under control of one or more promoters. Parvoviral genes can comprise nucleotide sequences encoding non-structural AAV replication proteins, such as Rep genes which encode Rep52, Rep40, Rep68 or Rep78 proteins, e.g., a combination of Rep78 and Rep52. Parvoviral genes can comprise nucleotide sequences encoding structural AAV proteins, such as Cap genes which encode VP1, VP2 and VP3 proteins.

[0237] Viral expression constructs of the present disclosure may comprise any compound or formulation, biological or chemical, which facilitates transformation, transfection, or transduction of a cell with a nucleic acid. Exemplary biological viral expression constructs comprise plasmids, linear nucleic acid molecules, and recombinant viruses comprising baculovirus. Exemplary chemical vectors comprise lipid complexes. Viral expression constructs are used to incorporate nucleic acid sequences into virus replication cells in accordance with the present disclosure. (O'Reilly, David R., Lois K. Miller, and Verne A. Luckow. Baculovirus expression vectors: a laboratory manual. Oxford University Press, 1994.); Maniatis et al., eds. Molecular Cloning. CSH Laboratory, NY, N.Y. (1982); and, Philiport and Scluber, eds. Liposomes as tools in Basic Research and Industry. CRC Press, Ann Arbor, Mich. (1995), the contents of which are each incorporated herein by reference in their entireties as related to viral expression constructs and uses thereof, insofar as they do not conflict with the present disclosure.

[0238] In certain embodiments, the viral expression construct is an AAV expression construct which comprises one or more nucleotide sequences encoding non-structural AAV replication proteins, structural AAV capsid proteins, or a combination thereof.

[0239] In certain embodiments, the viral expression construct of the present disclosure may be a plasmid vector. In certain embodiments, the viral expression construct of the present disclosure may be a baculoviral construct.

[0240] The present disclosure is not limited by the number of viral expression constructs employed to produce AAV particles or viral vectors. In certain embodiments, one, two, three, four, five, six, or more viral expression constructs can be employed to produce AAV particles in viral production cells in accordance with the present disclosure. In one non-limiting example, five expression constructs may individually encode AAV VP1, AAV VP2, AAV VP3, Rep52, Rep78, and with an accompanying payload construct comprising a payload polynucleotide and at least one AAV ITR. In another embodiment, expression constructs may be employed to express, for example, Rep52 and Rep40, or Rep78 and Rep 68. Expression constructs may comprise any combination of VP1, VP2, VP3, Rep52/Rep40, and Rep78/Rep68 coding sequences.

[0241] In certain embodiments of the present disclosure, a viral expression construct may be used for the production of an AAV particles in insect cells. In certain embodiments, modifications may be made to the wild type AAV sequences of the capsid and/or rep genes, for example to improve attributes of the viral particle, such as increased infectivity or specificity, or to enhance production yields.

[0242] In certain embodiments, the viral expression construct may encode the components of a Parvoviral capsid with incorporated Gly-Ala repeat region, which may function as an immune invasion sequence, as described in US Patent Application 20110171262, the content of which is incorporated herein by reference in its entirety as related to Parvoviral capsid proteins, insofar as it does not conflict with the present disclosure.

[0243] In certain embodiments of the present disclosure, a viral expression construct may be used for the production of AAV particles in insect cells. In certain embodiments, modifications may be made to the wild type AAV sequences of the capsid and/or rep genes, for example to improve attributes of the viral particle, such as increased infectivity or specificity, or to enhance production yields from insect cells.

### VP-Coding Region

[0244] In certain embodiments, a viral expression construct can comprise a VP-coding region. A VP-coding region is a nucleotide sequence which comprises a VP nucleotide sequence encoding VP1, VP2, VP3, or a combination thereof. In certain embodiments, a viral expression construct can comprise a VP1-coding region; a VP1-coding region is a nucleotide sequence which comprises a VP1 nucleotide sequence encoding a VP1 protein. In certain embodiments, a viral expression construct can comprise a VP2-coding region; a VP2-coding region is a nucleotide sequence which comprises a VP2 nucleotide sequence encoding a VP2 protein. In certain embodiments, a viral expression construct can comprise a VP3-coding region; a VP3-coding region is a nucleotide sequence which comprises a VP3 nucleotide sequence encoding a VP3 protein.

[0245] In certain embodiments, a VP-coding region encodes one or more AAV capsid proteins of a specific AAV serotype, e.g., AAV2. The AAV serotypes for VP-coding regions can be the same or different. In preferred embodiments, the VP coding regions are all from AAV2. In certain embodiments, a VP-coding region can be codon optimized. In certain embodiments, a VP-coding region or nucleotide sequence can be codon optimized for a mammal cell. In certain embodiments, a VP-coding region or nucleotide sequence can be codon optimized for an insect cell. In certain embodiments, a VP-coding region or nucleotide sequence can be codon optimized for a Spodoptera frugiperda cell. In certain embodiments, a VP-coding region or nucleotide sequence can be codon optimized for Sf9 or Sf21 cell lines.

[0246] In certain embodiments, a nucleotide sequence encoding one or more VP capsid proteins can be codon optimized to have a nucleotide homology with the reference nucleotide sequence of less than 100%. In certain embodiments, the nucleotide homology between the codon-optimized VP nucleotide sequence and the reference VP nucleotide sequence is less than 100%, less than 99%, less than 98%, less than 97%, less than 96%, less than 95%, less than 94%, less than 93%, less than 92%, less than 91%, less than 90%, less than 89%, less than 88%, less than 87%, less than 86%, less than 85%, less than 84%, less than 83%, less than 82%, less than 81%, less than 80%, less than 78%, less than 76%, less than 74%, less than 72%, less than 70%, less than 68%, less than 66%, less than 64%, less than 62%, less than 60%, less than 55%, less than 50%, and less than 40%.

[0247] Structural VP proteins, VP1, VP2, and VP3 of a viral expression construct can be encoded in a single open reading frame regulated by utilization of both alternative splice acceptor and non-canonical translational initiation codons. VP1, VP2 and VP3 can be transcribed and translated from a single transcript in which both in-frame and/or out-of-frame start codons are engineered to control the VP1:VP2:VP3 ratio produced by the nucleotide transcript.

[0248] In certain embodiments, VP1 can be produced from a sequence which encodes for VP1 only. As use herein, the terms “only for VP1” or “VP1 only” refers to a nucleotide sequence or transcript which encodes for a VP1 capsid protein and: (i) lacks the necessary start codons within the VP1 sequence (i.e. deleted or mutated) for full transcription or translation of VP2 and VP3 from the same sequence; (ii) comprises additional codons within the VP1 sequence which prevent transcription or translation of VP2 and VP3 from the same sequence; or (iii) comprises a start codon for VP1 (e.g., ATG), such that VP1 is the primary VP protein produced by the nucleotide transcript.

[0249] In certain embodiments, VP2 can be produced from a sequence which encodes for VP2 only. As use herein, the terms “only for VP2” or “VP2 only” refers to a nucleotide sequence or transcript which encodes for a VP2 capsid protein and: (i) the nucleotide transcript is a truncated variant of a full VP capsid sequence which encodes only VP2 and VP3 capsid proteins; and (ii) which comprise a start codon for VP2 (e.g., ATG), such that VP2 is the primary VP protein produced by the nucleotide transcript.

[0250] In certain embodiments, VP1 and VP2 can be produced from a sequence which encodes for VP1 and VP2 only. As use herein, the terms “only for VP1 and VP2” or “VP1 and VP2 only” refer to a nucleotide sequence or transcript which encodes for VP1 and VP2 capsid proteins and: (i) lacks the necessary start codons within the VP sequence (i.e. deleted or mutated) for full transcription or translation of VP3 from the same sequence; (ii) comprises additional codons within the VP sequence which prevent transcription or translation of VP3 from the same sequence; (iii) comprises a start codon for VP1 (e.g., ATG) and VP2 (e.g., ATG), such that VP1 and VP2 are the primary VP protein produced by the nucleotide transcript; or (iv) comprises VP1-only nucleotide transcript and a VP2-only nucleotide transcript connected by a linker, such as an IRES region.

[0251] In certain embodiments, the viral expression construct may contain a nucleotide sequence which comprises a start codon region, such as a sequence encoding AAV capsid proteins which comprise one or more start codon regions. In certain embodiments, the start codon region can be within an expression control sequence. The start codon can be ATG or a non-ATG codon (i.e., a suboptimal start codon where the start codon of the AAV VP1 capsid protein is a non-ATG). In certain embodiments, the viral expression construct used for AAV production may contain a nucleotide sequence encoding the AAV capsid proteins where the initiation codon of the AAV VP1 capsid protein is a non-ATG, i.e., a suboptimal initiation codon, allowing the expression of a modified ratio of the viral capsid proteins in the production system, to provide improved infectivity of the host cell. In a non-limiting example, a viral construct vector may contain a nucleic acid construct comprising a nucleotide sequence encoding AAV VP1, VP2, and VP3 capsid proteins, wherein the initiation codon for translation of the AAV VP1 capsid protein is CTG, TTG, or GTG, as described in U.S. Pat. No. 8,163,543, the content of which is incorporated herein by reference in its entirety as related to AAV capsid proteins and the production thereof, insofar as it does not conflict with the present disclosure.

### Rep-Coding Region

[0252] In certain embodiments, a viral expression construct can comprise a Rep52-coding region. A Rep52-coding region is a nucleotide sequence which comprises a Rep52 nucleotide sequence encoding a Rep52 protein. In certain embodiments, a viral expression construct can comprise a Rep78-coding region. A Rep78-coding region is a nucleotide sequence which comprises a Rep78 nucleotide sequence encoding a Rep78 protein. In certain embodiments, a viral expression construct can comprise a Rep40-coding region. A Rep40-coding region is a nucleotide sequence which comprises a Rep40 nucleotide sequence encoding a Rep40 protein. In certain embodiments, a viral expression construct can comprise a Rep68-coding region. A Rep68-coding region is a nucleotide sequence which comprises a Rep68 nucleotide sequence encoding a Rep68 protein.

[0253] In some embodiments, non-structural proteins, Rep52 and Rep78, of a viral expression construct can be encoded in a single open reading frame regulated by utilization of both alternative splice acceptor and non-canonical translational initiation codons.

[0254] Both Rep78 and Rep52 can be translated from a single transcript: Rep78 translation initiates at a first start codon (ATG or non-ATG) and Rep52 translation initiates from a Rep52 start codon (e.g., ATG) within the Rep78 sequence. Rep78 and Rep52 can also be translated from separate transcripts with independent start codons. The Rep52 initiation codons within the Rep78 sequence can be mutated, modified or removed, such that processing of the modified Rep78 sequence will not produce Rep52 proteins.

[0255] In certain embodiments, the viral expression construct of the present disclosure may be a plasmid vector or a baculoviral construct that encodes the parvoviral rep proteins for expression in insect cells. In certain embodiments, a single coding sequence is used for the Rep78 and Rep52 proteins, wherein start codon for translation of the Rep78 protein is a suboptimal start codon, selected from the group consisting of ACG, TTG, CTG, and GTG, that effects partial exon skipping upon expression in insect cells, as described in U.S. Pat. No. 8,512,981, the content of which is incorporated herein by reference in its entirety as related to the promotion of less abundant expression of Rep78 as compared to Rep52 to promote high vector yields, insofar as it does not conflict with the present disclosure.

[0256] In certain embodiments, the viral expression construct may be a plasmid vector or a baculoviral construct for the expression in insect cells that contains repeating codons with differential codon biases, for example to achieve improved ratios of Rep proteins, e.g., Rep78 and Rep52 thereby improving large scale (commercial) production of viral expression construct and/or payload construct vectors in insect cells, as taught in U.S. Pat. No. 8,697,417, the content of which is incorporated herein by reference in its entirety as related to AAV replication proteins and the production thereof, insofar as it does not conflict with the present disclosure.

[0257] In certain embodiment, improved ratios of rep proteins may be achieved using the method and constructs described in U.S. Pat. No. 8,642,314, the content of which is incorporated herein by reference in its entirety as related to AAV replications proteins and the production thereof, insofar as it does not conflict with the present disclosure.

[0258] In certain embodiments, the viral expression construct may encode mutant parvoviral Rep polypeptides which have one or more improved properties as compared with their corresponding wild-type Rep polypeptide, such as the preparation of higher virus titers for large scale production. Alternatively, they may be able to allow the production of better-quality viral particles or sustain more stable production of virus. In a non-limiting example, the viral expression construct may encode mutant Rep polypeptides with a mutated nuclear localization sequence or zinc finger domain, as described in Patent Application US 20130023034, the content of which is incorporated herein by reference in its entirety as related to AAV replications proteins and the production thereof, insofar as it does not conflict with the present disclosure.

### REN Access Points and Polynucleotide Inserts

[0259] In certain embodiments, a viral expression construct or a payload construct of the present disclosure can be a bacmid, also known as a baculovirus plasmid or recombinant baculovirus genome. In certain embodiments, a viral expression construct or a payload construct of the present disclosure (e.g., bacmid) can comprise a polynucleotide incorporated by homologous recombination (transposon donor/acceptor system) into the bacmid by standard molecular biology techniques known and performed by a person skilled in the art.

[0260] In certain embodiments, the polynucleotide incorporated into the bacmid (i.e. polynucleotide insert) can comprise an expression control sequence operably linked to a protein-coding nucleotide sequence. In certain embodiments, the polynucleotide incorporated into the bacmid can comprise an expression control sequence which comprises a promoter, such as p10 or polH, and which is operably linked to a nucleotide sequence which encodes a structural AAV capsid protein (e.g., VP1, VP2, VP3 or a combination thereof). In certain embodiments, the nucleotide sequence encoding a structural AAV capsid protein (e.g., VP1, VP2, VP3, or a combination thereof) is operably linked to a p10 promoter. In certain embodiments, the polynucleotide incorporated into the bacmid can comprise an expression control sequence which comprises a promoter, such as p10 or polH, and which is operably linked to a nucleotide sequence which encodes a non-structural AAV capsid protein (e.g., Rep78, Rep52, or a combination thereof). In certain embodiments, the nucleotide sequencing encoding a non-structural AAV protein (e.g., Rep 78, Rep 52, or a combination thereof) is operably linked to a polH promoter. In certain embodiments, the nucleotide sequence encoding a structural AAV capsid protein (e.g., VP1, VP2, VP3, or a combination thereof) is operably linked to a p10 promoter and the nucleotide sequencing encoding a non-structural AAV protein (e.g., Rep 78, Rep 52, or a combination thereof) is operably linked to a polH promoter.

[0261] In certain embodiments, the polynucleotide insert can be incorporated into the bacmid at the location of a baculoviral gene. In certain embodiments, the polynucleotide insert can be incorporated into the bacmid at the location of a non-essential baculoviral gene. In certain embodiments, the polynucleotide insert can be incorporated into the bacmid by replacing a baculoviral gene or a portion of the baculoviral gene with the polynucleotide insert. In certain embodiments, the polynucleotide insert can be incorporated into the bacmid by replacing a baculoviral gene or a portion of the baculoviral gene with a fusion-polynucleotide which comprises the polynucleotide insert and the baculoviral gene (or portion thereof) being replaced.

[0262] In certain embodiments, the polynucleotide insert can be incorporated into the bacmid by splitting a baculoviral gene with the polynucleotide insert (i.e., the polynucleotide insert is incorporated into the middle of the gene, separating a 5′-portion of the gene from a 3′-portion of the bacmid gene). In certain embodiments, the polynucleotide insert can be incorporated into the bacmid by splitting a baculoviral gene with the fusion-polynucleotide which comprises the polynucleotide insert and a portion of the baculoviral gene which was split. In certain embodiments, the 3′ end of the fusion-polynucleotide comprises the 5′-portion of the gene that was split, such that the 5′-portion of the gene in the fusion-polynucleotide and the 3′-portion of the gene remaining in the bacmid form a full or functional portion of the baculoviral gene. In certain embodiments, the 5′ end of the fusion-polynucleotide comprises the 3′-portion of the gene that was split, such that the 3′-portion of the gene in the fusion-polynucleotide and the 5′-portion of the gene remaining in the bacmid form a full or functional portion of the baculoviral gene.

[0263] In certain embodiments, the polynucleotide can be incorporated into the bacmid at the location of a restriction endonuclease (REN) cleavage site (i.e., REN access point) associated with a baculoviral gene. In certain embodiments, the REN access point in the bacmid is FseI (corresponding with the gta baculovirus gene) (ggccggcc). In certain embodiments, the REN access point in the bacmid is SdaI (corresponding with the DNA polymerase baculovirus gene) (cctgcagg). In certain embodiments, the REN access point in the bacmid is MauBI (corresponding with the lef-4 baculovirus gene) (cgcgcgcg). In certain embodiments, the REN access point in the bacmid is SbfI (corresponding with the gp64/gp67 baculovirus gene) (cctgcagg). In certain embodiments, the REN access point in the bacmid is I-CeuI (corresponding with the v-cath baculovirus gene) (SEQ ID NO: 1735). In certain embodiments, the REN access point in the bacmid is AvrII (corresponding with the egt baculovirus gene) (cctagg). In certain embodiments, the REN access point in the bacmid is NheI (gctagc). In certain embodiments, the REN access point in the bacmid is SpeI (actagt). In certain embodiments, the REN access point in the bacmid is BstZ17I (gtatac). In certain embodiments, the REN access point in the bacmid is NcoI (ccatgg). In certain embodiments, the REN access point in the bacmid is MluI (acgcgt).

[0264] In certain embodiments where the bacmid is a double-stranded construct, the REN cleavage site can comprise a cleavage sequence in one strand and the reverse complement of the cleavage sequence (which also functions as a cleavage sequence) in the other strand. A polynucleotide insert (or strand thereof) can thus comprise a REN cleavage sequence or the reverse complement REN cleavage sequence (which are generally functionally interchangeable). As a non-limiting example, a strand of a polynucleotide insert can comprise an FseI cleave sequence (ggccggcc) or its reverse complement REN cleavage sequence (ccggccgg).

[0265] Polynucleotides can be incorporated into these REN access points by: (i) providing a polynucleotide insert which has been engineered to comprise a target REN cleavage sequence (e.g., a polynucleotide insert engineered to comprise FseI REN sequences at both ends of the polynucleotide); (ii) proving a bacmid which comprises the target REN access point for polynucleotide insertion (e.g., a variant of the AcMNPV bacmid bMON14272 which comprises an FseI cleavage site (ii) digesting the REN-engineered polynucleotide with the appropriate REN enzyme (e.g., using FseI enzyme to digesting the REN-engineering polynucleotide which comprises the FseI regions at both ends, to produce a polynucleotide-FseI insert); (iii) digesting the bacmid with the same REN enzyme to produce a single-cut bacmid at the REN access point (e.g., using FseI enzyme to produce a single-cut bacmid at the FseI location); and (iv) ligating the polynucleotide insert into the single-cut bacmid using an appropriate ligation enzyme, such as T4 ligase enzyme. The result is engineered bacmid DNA which comprises the engineered polynucleotide insert at the target REN access point.

[0266] The insertion process can be repeated one or more times to incorporate other engineered polynucleotide inserts into the same bacmid at different REN access points (e.g., insertion of a first engineered polynucleotide insert at the AvrII REN access point in the egt, followed by insertion of a second engineered polynucleotide insert at the I-CeuI REN access point in the cath gene, and followed by insertion of a third engineered polynucleotide insert at the FseI REN access point in the gta gene).

[0267] In certain embodiments, restriction endonuclease (REN) cleavage can be used to remove one or more wild-type genes from a bacmid. In certain embodiments, restriction endonuclease (REN) cleavage can be used to remove one or more engineered polynucleotide insert which has been previously been inserted into the bacmid. In certain embodiments, restriction endonuclease (REN) cleavage can be used to replace one or more engineered polynucleotide inserts with a different engineered polynucleotide insert which comprises the same REN cleavage sequences (e.g., an engineered polynucleotide insert at the FseI REN access point can be replaced with a different engineered polynucleotide insert which comprises FseI REN cleavage sequences).

### Expression Control

### Expression Control Regions

[0268] The viral expression constructs of the present disclosure can comprise one or more expression control region encoded by expression control sequences. In certain embodiments, the expression control sequences are for expression in a viral production cell, such as an insect cell. In certain embodiments, the expression control sequences are operably linked to a protein-coding nucleotide sequence. In certain embodiments, the expression control sequences are operably linked to a VP coding nucleotide sequence or a Rep coding nucleotide sequence.

[0269] Herein, the terms “coding nucleotide sequence”, “protein-encoding gene” or “protein-coding nucleotide sequence” refer to a nucleotide sequence that encodes or is translated into a protein product, such as VP proteins or Rep proteins. “Operably linked” means that the expression control sequence is positioned relative to the coding sequence such that it can promote the expression of the encoded gene product.

[0270] “Expression control sequence” refers to a nucleic acid sequence that regulates the expression of a nucleotide sequence to which it is operably linked. An expression control sequence is “operably linked” to a nucleotide sequence when the expression control sequence controls and regulates the transcription and/or the translation of the nucleotide sequence. Thus, an expression control sequence can comprise promoters, enhancers, untranslated regions (UTRs), internal ribosome entry sites (IRES), transcription terminators, a start codon in front of a protein-encoding gene, splicing signal for introns, and stop codons. The term “expression control sequence” is intended to comprise, at a minimum, a sequence whose presence are designed to influence expression, and can also comprise additional advantageous components. For example, leader sequences and fusion partner sequences are expression control sequences. The term can also comprise the design of the nucleic acid sequence such that undesirable, potential initiation codons in and out of frame, are removed from the sequence. It can also comprise the design of the nucleic acid sequence such that undesirable potential splice sites are removed. It comprises sequences or polyadenylation sequences (pA) which direct the addition of a poly(A) tail, i.e., a string of adenine residues at the 3′-end of an mRNA, sequences referred to as poly(A) sequences. It also can be designed to enhance mRNA stability. Expression control sequences which affect the transcription and translation stability, e.g., promoters, as well as sequences which effect the translation, e.g., Kozak sequences, are known in insect cells. Expression control sequences can be of such nature as to modulate the nucleotide sequence to which it is operably linked such that lower expression levels or higher expression levels are achieved.

[0271] In certain embodiments, the expression control sequence can comprise one or more promoters. Promoters can comprise, but are not limited to, baculovirus major late promoters, insect virus promoters, non-insect virus promoters, vertebrate virus promoters, nuclear gene promoters, chimeric promoters from one or more species comprising virus and non-virus elements, and/or synthetic promoters. In certain embodiments, a promoter can be Ctx, Op-EI, EI, ΔEI, EI-1, pH, PIO, polH (polyhedron), ΔpolH, Dmhsp70, Hr1, Hsp70, 4×Hsp27 EcRE+minimal Hsp70, IE, IE-1, ΔIE-1, ΔIE, p10, Δp10 (modified variations or derivatives of p10), p⁵, p1⁹, p35, p40, p6.9, and variations or derivatives thereof. In certain embodiments, the nucleotide sequence encoding a structural AAV capsid protein (e.g., VP1, VP2, VP3, or a combination thereof) is operably linked to a p10 promoter, the nucleotide sequencing encoding a non-structural AAV protein (e.g., Rep 78, Rep 52, or a combination thereof) is operably linked to a polH promoter, and the nucleotide sequence encoding a payload (e.g., AADC, e.g., SEQ ID NO: 979) is operably linked to a CMV promoter. In certain embodiments, the promoter is a Ctx promoter. In certain embodiments, the promoter is a p10 promoter. In certain embodiments, the promoter is a polH promoter. In certain embodiments, a promoter can be selected from tissue-specific promoters, cell-type-specific promoters, cell-cycle-specific promoters, and variations or derivatives thereof. In certain embodiments, a promoter can be a CMV promoter, an alpha 1-antitrypsin (α1-AT) promoter, a thyroid hormone-binding globulin promoter, a thyroxine-binding globulin (LPS) promoter, an HCR-ApoCII hybrid promoter, an HCR-hAAT hybrid promoter, an albumin promoter, an apolipoprotein E promoter, an α1-AT+EaIb promoter, a tumor-selective E2F promoter, a mononuclear blood IL-2 promoter, and variations or derivatives thereof. In certain embodiments, the promoter is a low-expression promoter sequence. In certain embodiments, the promoter is an enhanced-expression promoter sequence. In certain embodiments, the promoter can comprise Rep or Cap promoters as described in US Patent Application 20110136227, the content of which is incorporated herein by reference in its entirety as related to expression promoters, insofar as it does not conflict with the present disclosure.

[0272] In certain embodiments, a viral expression construct can comprise the same promoter in all nucleotide sequences. In certain embodiments, a viral expression construct can comprise the same promoter in two or more nucleotide sequences. In certain embodiments, a viral expression construct can comprise a different promoter in two or more nucleotide sequences. In certain embodiments, a viral expression construct can comprise a different promoter in all nucleotide sequences.

[0273] In certain embodiments the viral expression construct encodes elements to improve expression in certain cell types. In a further embodiment, the expression construct may comprise polh and/or ΔIE-1 insect transcriptional promoters, CMV mammalian transcriptional promoter, and/or p10 insect specific promoters for expression of a desired gene in a mammalian or insect cell.

[0274] More than one expression control sequence can be operably linked to a given nucleotide sequence. For example, a promoter sequence, a translation initiation sequence, and a stop codon can be operably linked to a nucleotide sequence.

[0275] In certain embodiments, the viral expression construct can comprise one or more expression control sequence between protein-coding nucleotide sequences. In certain embodiments, an expression control region can comprise an IRES sequence region which comprises an IRES nucleotide sequence encoding an internal ribosome entry sight (IRES). The internal ribosome entry sight (IRES) can be selected from the group consisting or: FMDV-IRES from Foot-and-Mouth-Disease virus, EMCV-IRES from Encephalomyocarditis virus, and combinations thereof.

[0276] In certain embodiments, the viral expression construct may contain a nucleotide sequence which comprises a start codon region, such as a sequence encoding AAV capsid proteins which comprise one or more start codon regions. In certain embodiments, the start codon region can be within an expression control sequence.

[0277] In certain embodiments, the viral expression construct is as described in any of PCT/US2019/054600 and/or U.S. Provisional Patent Application No. 62/741,855, the contents of which are each incorporated by reference in their entireties.

[0278] In certain embodiments, the viral expression construct comprises a first VP-coding region which comprises a nucleotide sequence encoding one or more AAV capsid proteins selected from VP1, VP2, and VP3. In certain embodiments, the first VP-coding region comprises a nucleotide sequence encoding one or more AAV capsid proteins selected from VP2 and VP3. In certain embodiments, the first VP-coding region comprises a nucleotide sequence encoding VP1, VP2, and VP3 AAV capsid proteins. In certain embodiments, the first VP-coding region comprises a nucleotide sequence encoding VP2 and VP3 AAV capsid proteins. In certain embodiments, the first VP-coding region comprises a nucleotide sequence encoding only VP2 and VP3 AAV capsid proteins. In certain embodiments, the first VP-coding region comprises a nucleotide sequence encoding VP2 and VP3 AAV capsid proteins, but not VP1.

[0279] In certain embodiments, the nucleic acid construct comprises a second VP-coding region which comprises a nucleotide sequence encoding one or more AAV capsid proteins selected from VP1, VP2, and VP3. In certain embodiments, the second VP-coding region comprises a nucleotide sequence encoding VP1 AAV capsid proteins. In certain embodiments, the second VP-coding region comprises a nucleotide sequence encoding only VP1 AAV capsid proteins. In certain embodiments, the second VP-coding region comprises a nucleotide sequence encoding VP1 AAV capsid proteins, but not VP2 or VP3.

[0280] In certain embodiments, the viral expression construct is an engineered nucleic acid construct. In certain embodiments, the viral expression construct comprises a first nucleotide sequence which comprises the first VP-coding region and the second VP-coding region. In certain embodiments, the first nucleotide sequence comprises a first open reading frame (ORF) which comprises the first VP-coding region, and a second open reading frame (ORF) which comprises the second VP-coding region.

[0281] In certain embodiments, the viral expression construct comprises a first nucleotide sequence which comprises the first VP-coding region and a second nucleotide sequence which comprises the second VP-coding region. In certain embodiments, the first nucleotide sequence comprises a first open reading frame (ORF) which comprises the first VP-coding region, and the second nucleotide sequence comprises a second open reading frame (ORF) which comprises the second VP-coding region. In certain embodiments, the first open reading frame is different from the second open reading frame.

[0282] In certain embodiments, the viral expression construct comprises a first VP-coding region which comprises a nucleotide sequence encoding one or more AAV capsid proteins selected from VP1, VP2, and VP3; and a second VP-coding region which comprises a nucleotide sequence encoding one or more AAV capsid proteins selected from VP1, VP2, and VP3. In certain embodiments, the first VP-coding region comprises a nucleotide sequence encoding VP1, VP2 and VP3 AAV capsid proteins; and the second VP-coding region comprises a nucleotide sequence encoding only VP1 AAV capsid proteins. In certain embodiments, the first VP-coding region comprises a nucleotide sequence encoding VP1, VP2, and VP3 AAV capsid proteins; and the second VP-coding region comprises a nucleotide sequence encoding VP1 AAV capsid proteins, but not VP2 or VP3. In certain embodiments, the first VP-coding region comprises a nucleotide sequence encoding only VP2 and VP3 AAV capsid proteins; and the second VP-coding region comprises a nucleotide sequence encoding only VP1 AAV capsid proteins. In certain embodiments, the first VP-coding region comprises a nucleotide sequence encoding VP2 and VP3 AAV capsid proteins, but not VP1; and the second VP-coding region which comprises a nucleotide sequence encoding VP1 AAV capsid proteins, but not VP2 or VP3.

[0283] In certain embodiments, the viral expression construct comprises one or more start codon regions which include a start codon. In certain embodiments, the viral expression construct comprises one or more stop codon regions which include a stop codon. In certain embodiments, the viral expression construct comprises one or more start codon regions and one or more stop codon regions.

[0284] In certain embodiments, the viral expression construct comprises one or more expression control regions which comprise an expression control sequence. In certain embodiments, the expression control region comprises one or more promoter sequences. In certain embodiments, the expression control region comprises one or more promoter sequences selected from the group consisting of: baculovirus major late promoters, insect virus promoters, non-insect virus promoters, vertebrate virus promoters, nuclear gene promoters, chimeric promoters from one or more species including virus and non-virus elements, synthetic promoters, and variations or derivatives thereof. In certain embodiments, the expression control region comprises one or more promoter sequences selected from the group consisting of: Ctx promoter, polh insect transcriptional promoters, ΔIE-1 insect transcriptional promoters, p10 insect specific promoters, Δp10 insect specific promoters (variations or derivatives of p10), CMV mammalian transcriptional promoter, and variations or derivatives thereof. In certain embodiments, the expression control region comprises one or more low-expression promoter sequences. In certain embodiments, the expression control region comprises one or more enhanced-expression promoter sequences.

[0285] In certain embodiments, the first VP-coding region encodes AAV capsid proteins of an AAV serotype, e.g., AAV2. In certain embodiments, the second VP-coding region encodes AAV capsid proteins of an AAV serotype, e.g., AAV2. In certain embodiments, the AAV serotype of the first VP-coding region is the same as the AAV serotype of the second VP-coding region. In certain embodiments, the AAV serotype of the first VP-coding region is different from the AAV serotype of the second VP-coding region. In certain embodiments, a VP-coding region can be codon optimized for an insect cell. In certain embodiments, a VP-coding region can be codon optimized for a Spodoptera frugiperda cell.

[0286] In certain embodiments, a nucleotide sequence encoding a VP1 capsid protein can be codon optimized. In certain embodiments, a nucleotide sequence encoding a VP1 capsid protein can be codon optimized for an insect cell. In certain embodiments, a nucleotide sequence encoding a VP2 capsid protein can be codon optimized. In certain embodiments, a nucleotide sequence encoding a VP2 capsid protein can be codon optimized for an insect cell. In certain embodiments, a nucleotide sequence encoding a VP3 capsid protein can be codon optimized. In certain embodiments, a nucleotide sequence encoding a VP3 capsid protein can be codon optimized for an insect cell.

[0287] In certain embodiments, a nucleotide sequence encoding a VP1 capsid protein can be codon optimized to have a nucleotide homology with the reference nucleotide sequence of less than 100%. In certain embodiments, the nucleotide homology between the codon-optimized VP1 nucleotide sequence and the reference VP1 nucleotide sequence is less than 100%, less than 99%, less than 98%, less than 97%, less than 96%, less than 95%, less than 94%, less than 93%, less than 92%, less than 91%, less than 90%, less than 89%, less than 88%, less than 87%, less than 86%, less than 85%, less than 84%, less than 83%, less than 82%, less than 81%, less than 80%, less than 78%, less than 76%, less than 74%, less than 72%, less than 70%, less than 68%, less than 66%, less than 64%, less than 62%, less than 60%, less than 55%, less than 50%, and less than 40%.

[0288] In certain embodiments, a nucleotide sequence encoding a VP2 capsid protein can be codon optimized to have a nucleotide homology with the reference nucleotide sequence of less than 100%. In certain embodiments, the nucleotide homology between the codon-optimized VP1 nucleotide sequence and the reference VP1 nucleotide sequence is less than 100%, less than 99%, less than 98%, less than 97%, less than 96%, less than 95%, less than 94%, less than 93%, less than 92%, less than 91%, less than 90%, less than 89%, less than 88%, less than 87%, less than 86%, less than 85%, less than 84%, less than 83%, less than 82%, less than 81%, less than 80%, less than 78%, less than 76%, less than 74%, less than 72%, less than 70%, less than 68%, less than 66%, less than 64%, less than 62%, less than 60%, less than 55%, less than 50%, and less than 40%.

[0289] In certain embodiments, a nucleotide sequence encoding a VP3 capsid protein can be codon optimized to have a nucleotide homology with the reference nucleotide sequence of less than 100%. In certain embodiments, the nucleotide homology between the codon-optimized VP1 nucleotide sequence and the reference VP1 nucleotide sequence is less than 100%, less than 99%, less than 98%, less than 97%, less than 96%, less than 95%, less than 94%, less than 93%, less than 92%, less than 91%, less than 90%, less than 89%, less than 88%, less than 87%, less than 86%, less than 85%, less than 84%, less than 83%, less than 82%, less than 81%, less than 80%, less than 78%, less than 76%, less than 74%, less than 72%, less than 70%, less than 68%, less than 66%, less than 64%, less than 62%, less than 60%, less than 55%, less than 50%, and less than 40%.

[0290] In certain embodiments, the viral expression construct comprises: (i) a first nucleotide sequence which comprises a first expression control region comprising a first promoter sequence, and a first VP-coding region which comprises a nucleotide sequence encoding one or more AAV capsid proteins selected from VP1, VP2, and VP3; and (ii) a second nucleotide sequence which comprises a second expression control region comprising a second promoter sequence, and a second VP-coding region which comprises a nucleotide sequence encoding VP1 AAV capsid proteins, but not VP2 or VP3. In certain embodiments, the viral expression construct comprises: (i) a first nucleotide sequence which comprises a first expression control region comprising a first promoter sequence, and a first VP-coding region which comprises a nucleotide sequence encoding VP2 and VP3 AAV capsid proteins, but not VP1; and (ii) a second nucleotide sequence which comprises a second expression control region comprising a second promoter sequence, and a second VP-coding region which comprises a nucleotide sequence encoding VP1 AAV capsid proteins, but not VP2 or VP3. In certain embodiments, the nucleotide sequence of the second VP-coding region is codon optimized. In certain embodiments, the nucleotide sequence of the second VP-coding region is codon optimized for an insect cell, or more specifically for a Spodoptera frugiperda cell. In certain embodiments, the nucleotide sequence of the second VP-coding region is codon optimized codon optimized to have a nucleotide homology with the reference nucleotide sequence of less than 100%, less than 90%, or less than 80%.

[0291] In certain embodiments, the viral expression construct comprises: (i) a first nucleotide sequence which comprises a first expression control region comprising a first promoter sequence, a first start codon region which comprises a first start codon, a first VP-coding region which comprises a nucleotide sequence encoding one or more AAV capsid proteins selected from VP1, VP2 and VP3, and a first stop codon region which comprises a first stop codon; and (ii) a second nucleotide sequence which comprises a second expression control region comprising a second promoter sequence, a second start codon region which comprises a second start codon, a second VP-coding region which comprises a nucleotide sequence encoding VP1 AAV capsid proteins, but not VP2 or VP3, and a second stop codon region which comprises a second stop codon. In certain embodiments, the nucleic acid construct comprises: (i) a first nucleotide sequence which comprises a first expression control region comprising a first promoter sequence, a first start codon region which comprises a first start codon, a first VP-coding region which comprises a nucleotide sequence encoding VP2 and VP3 AAV capsid proteins, but not VP1, and a first stop codon region which comprises a first stop codon; and (ii) a second nucleotide sequence which comprises a second expression control region comprising a second promoter sequence, a second start codon region which comprises a second start codon, a second VP-coding region which comprises a nucleotide sequence encoding VP1 AAV capsid proteins, but not VP2 or VP3, and a second stop codon region which comprises a second stop codon. In certain embodiments, the first start codon is ATG, the second start codon is ATG, or both the first and second start codons are ATG.

[0292] In certain embodiments, the viral expression construct comprises a first nucleotide sequence which comprises: a Rep52-coding region which comprises a Rep52 sequence encoding a Rep52 protein, a Rep78-coding region which comprises a Rep78 sequence encoding a Rep78 protein, or a combination thereof. In certain embodiments, the first nucleotide sequence comprises both a Rep52-coding region and a Rep78-coding region. In certain embodiments, the first nucleotide sequence comprises a single open reading frame, consists essentially of a single open reading frame, or consists of a single open reading frame. In certain embodiments, the first nucleotide sequence comprises a first open reading frame which comprises a Rep52-coding region, and a second open reading frame which comprises a Rep78-coding region and which is different from the first open reading frame.

[0293] In certain embodiments, an expression control region can comprise a 2A sequence region which comprises a 2A nucleotide sequence encoding a viral 2A peptide. The sequence allows for co-translation of multiple polypeptides within a single open reading frame (ORF). As the ORF is translated, glycine and proline residues with the 2A sequence prevent the formation of a normal peptide bond, which results in ribosomal “skipping” and “self-cleavage” within the polypeptide chain. The viral 2A peptide can be selected from the group consisting of: F2A from Foot-and-Mouth-Disease virus, T2A from Thosea asigna virus, E2A from Equine rhinitis virus A, P2A from Porcine teschovirus-1, BmCPV2A from cytoplasmic polyhedrosis virus, BmIFV 2A from B. mori flacherie virus, and combinations thereof.

[0294] In certain embodiments, a first nucleotide sequence comprises a Rep52-coding region and 2A sequence region. In certain embodiments, a first nucleotide sequence comprises a Rep78-coding region and 2A sequence region. In certain embodiments, a first nucleotide sequence comprises a Rep52-coding region, a Rep78-coding region, and 2A sequence region. In certain embodiments, a first nucleotide sequence comprises a 2A sequence region located between a Rep52-coding region and a Rep78-coding region on the nucleotide sequence. In certain embodiments, a first nucleotide comprises, in order from the 5′-end to the 3′-end, a Rep52-coding region, a 2A sequence region, and a Rep78-coding region. In certain embodiments, a first nucleotide comprises, in order from the 5′-end to the 3′-end, a Rep78-coding region, a 2A sequence region, and a Rep52-coding region.

[0295] In some embodiments, the first and/or second nucleotide sequence comprises a start codon and/or stop codon and/or internal ribosome entry site (IRES). In certain embodiments, the IRES nucleotide sequence encodes an internal ribosome entry site (IRES) selected from the group consisting of: FMDV-IRES from Foot-and-Mouth-Disease virus, EMCV-IRES from Encephalomyocarditis virus, and combinations thereof.

[0296] For example, in certain embodiments, a first nucleotide sequence comprises a start codon region, a Rep52-coding region, 2A sequence region, and a stop codon region. In certain embodiments, a first nucleotide sequence comprises a start codon region, a Rep78-coding region, 2A sequence region, and a stop codon region. In certain embodiments, a first nucleotide sequence comprises a start codon region, a Rep52-coding region, a 2A sequence region, a Rep78-coding region, and a stop codon region. In certain embodiments, a first nucleotide comprises, in order from the 5′-end to the 3′-end, a start codon region, a Rep52-coding region, a 2A sequence region, a Rep78-coding region, and a stop codon region. In certain embodiments, a first nucleotide comprises, in order from the 5′-end to the 3′-end, a start codon region, a Rep78-coding region, a 2A sequence region, a Rep52-coding region, and a stop codon region.

[0297] In certain embodiments, a first nucleotide sequence comprises a Rep52-coding region, a Rep78-coding region, and an IRES sequence region. In certain embodiments, a first nucleotide sequence comprises an IRES sequence region located between a Rep52-coding region and a Rep78-coding region on the nucleotide sequence. In certain embodiments, a first nucleotide comprises, in order from the 5′-end to the 3′-end, a Rep52-coding region, an IRES sequence region, and a Rep78-coding region. In certain embodiments, a first nucleotide comprises, in order from the 5′-end to the 3′-end, a Rep78-coding region, an IRES sequence region, and a Rep52-coding region.

[0298] In certain embodiments, the first nucleotide sequence comprises a first open reading frame which comprises a Rep52-coding region, a second open reading frame which comprises a Rep78-coding region, and an IRES sequence region located between the first open reading frame and the second open reading frame. In certain embodiments, a first nucleotide sequence comprises, in order from the 5′-end to the 3′-end, a first open reading frame which comprises a Rep52-coding region, an IRES sequence region, and a second open reading frame which comprises a Rep78-coding region. In certain embodiments, a first nucleotide sequence comprises, in order from the 5′-end to the 3′-end, a first open reading frame which comprises a Rep78-coding region, an IRES sequence region, and a second open reading frame which comprises a Rep52-coding region.

[0299] In certain embodiments, a first nucleotide sequence comprises, in order from the 5′-end to the 3′-end: a first open reading frame which comprises a first start codon region, a Rep52-coding region, and a first stop codon region; an IRES sequence region; and a second open reading frame which comprises a second start codon region, a Rep78-coding region, and a second stop codon region. In certain embodiments, a first nucleotide sequence comprises, in order from the 5′-end to the 3′-end: a first open reading frame which comprises a first start codon region, a Rep78-coding region, and a first stop codon region; an IRES sequence region; and a second open reading frame which comprises a second start codon region, a Rep52-coding region, and a second stop codon region.

[0300] In certain embodiments, the nucleic acid construct comprises a first nucleotide sequence, and a second nucleotide sequence which is separate from the first nucleotide sequence within the nucleic acid construct. In certain embodiments, the nucleic acid construct comprises a first nucleotide sequence which comprises a Rep52-coding region, and a separate second nucleotide sequence which comprises a Rep78-coding region. In certain embodiments, the nucleic acid construct comprises a first nucleotide sequence and a separate second nucleotide sequence; wherein the first nucleotide sequence comprises a Rep52-coding region and a 2A sequence region; and wherein the second nucleotide sequence comprises a Rep78-coding region and a 2A sequence region.

[0301] In certain embodiments, the viral expression construct comprises one or more essential-gene regions which comprises an essential-gene nucleotide sequence encoding an essential protein for the nucleic acid construct. In certain embodiments, the essential-gene nucleotide sequence is a baculoviral sequence encoding an essential baculoviral protein. In certain embodiments, the essential baculoviral protein is a baculoviral envelope protein or a baculoviral capsid protein. For example, in certain embodiments, the nucleic acid construct comprises a first nucleotide sequence and a separate second nucleotide sequence; wherein the first nucleotide sequence comprises a Rep52-coding region and a first essential-gene region; and wherein the second nucleotide sequence comprises a Rep78-coding region and a second essential-gene region. In certain embodiments, the nucleic acid construct comprises a first nucleotide sequence and a separate second nucleotide sequence; wherein the first nucleotide sequence comprises a Rep52-coding region, a 2A sequence region, and a first essential-gene region; and wherein the second nucleotide sequence comprises a Rep78-coding region, a 2A sequence region, and a second essential-gene region. In certain embodiments, the nucleic acid construct comprises a first nucleotide sequence and a separate second nucleotide sequence; wherein the first nucleotide sequence comprises, in order, a Rep52-coding region, a 2A sequence region, and a first essential-gene region; and wherein the second nucleotide sequence comprises, in order, a Rep78-coding region, a 2A sequence region, and a second essential-gene region.

[0302] In certain embodiments, the essential baculoviral protein is a GP64 baculoviral envelope protein. In certain embodiments, the essential baculoviral protein is a VP39 baculoviral capsid protein.

[0303] The method of the present disclosure is not limited by the use of specific expression control sequences. However, when a certain stoichiometry of VP products are achieved (close to 1:1:10 for VP1, VP2, and VP3, respectively) and also when the levels of Rep52 or Rep40 (also referred to as the p19 Reps) are significantly higher than Rep78 or Rep68 (also referred to as the p5 Reps), improved yields of AAV in production cells (such as insect cells) may be obtained. In certain embodiments, the p5/p19 ratio is below 0.6 more, below 0.4, or below 0.3, but always at least 0.03. These ratios can be measured at the level of the protein or can be implicated from the relative levels of specific mRNAs.

[0304] In some embodiments, a viral expression construct may further comprise a polynucleotide encoding AADC.

[0305] In certain embodiments, AAV particles, e.g., those comprising a polynucleotide encoding AADC, e.g., those comprising SEQ ID NO: 979 are produced in viral production cells (such as mammalian or insect cells) wherein all three VP proteins are expressed at a stoichiometry approaching, about or which is 1:1:10 (VP1:VP2:VP3).

[0306] In certain embodiments, AAV particles are produced in viral production cells (such as mammalian or insect cells) wherein all three VP proteins are expressed at a stoichiometry approaching, about or which is 2:2:10 (VP1:VP2:VP3).

[0307] In certain embodiments, AAV particles are produced in viral production cells (such as mammalian or insect cells) wherein all three VP proteins are expressed at a stoichiometry approaching, about or which is 2:0:10 (VP1:VP2:VP3).

[0308] In certain embodiments, AAV particles are produced in viral production cells (such as mammalian or insect cells) wherein all three VP proteins are expressed at a stoichiometry approaching, about or which is 1-2:0-2:10 (VP1:VP2:VP3).

[0309] In certain embodiments, AAV particles are produced in viral production cells (such as mammalian or insect cells) wherein all three VP proteins are expressed at a stoichiometry approaching, about or which is 1-2:1-2:10 (VP1:VP2:VP3).

[0310] In certain embodiments, AAV particles are produced in viral production cells (such as mammalian or insect cells) wherein all three VP proteins are expressed at a stoichiometry approaching, about or which is 2-3:0-3:10 (VP1:VP2:VP3).

[0311] In certain embodiments, AAV particles are produced in viral production cells (such as mammalian or insect cells) wherein all three VP proteins are expressed at a stoichiometry approaching, about or which is 2-3:2-3:10 (VP1:VP2:VP3).

[0312] In certain embodiments, AAV particles are produced in viral production cells (such as mammalian or insect cells) wherein all three VP proteins are expressed at a stoichiometry approaching, about or which is 3:3:10 (VP1:VP2:VP3).

[0313] In certain embodiments, AAV particles are produced in viral production cells (such as mammalian or insect cells) wherein all three VP proteins are expressed at a stoichiometry approaching, about or which is 3-5:0-5:10 (VP1:VP2:VP3).

[0314] In certain embodiments, AAV particles are produced in viral production cells (such as mammalian or insect cells) wherein all three VP proteins are expressed at a stoichiometry approaching, about or which is 3-5:3-5:10 (VP1:VP2:VP3).

[0315] In certain embodiments, the expression control regions are engineered to produce a VP1:VP2:VP3 ratio selected from the group consisting of: about or exactly 1:0:10; about or exactly 1:1:10; about or exactly 2:1:10; about or exactly 2:1:10; about or exactly 2:2:10; about or exactly 3:0:10; about or exactly 3:1:10; about or exactly 3:2:10; about or exactly 3:3:10; about or exactly 4:0:10; about or exactly 4:1:10; about or exactly 4:2:10; about or exactly 4:3:10; about or exactly 4:4:10; about or exactly 5:5:10; about or exactly 1-2:0-2:10; about or exactly 1-2:1-2:10; about or exactly 1-3:0-3:10; about or exactly 1-3:1-3:10; about or exactly 1-4:0-4:10; about or exactly 1-4:1-4:10; about or exactly 1-5:1-5:10; about or exactly 2-3:0-3:10; about or exactly 2-3:2-3:10; about or exactly 2-4:2-4:10; about or exactly 2-5:2-5:10; about or exactly 3-4:3-4:10; about or exactly 3-5:3-5:10; and about or exactly 4-5:4-5:10.

[0316] In certain embodiments of the present disclosure, Rep52 or Rep78 is transcribed from the baculoviral derived polyhedron promoter (polh). Rep52 or Rep78 can also be transcribed from a weaker promoter, for example a deletion mutant of the IE-1 promoter, the ΔIE-1 promoter, has about 20% of the transcriptional activity of that IE-1 promoter. A promoter substantially homologous to the ΔIE-1 promoter may be used. In respect to promoters, a homology of at least 50%, 60%, 70%, 80%, 90% or more, is considered to be a substantially homologous promoter.

### Engineered Untranslated Regions (UTRs)

[0317] The present disclosure presents engineered untranslated regions (UTRs), comprising engineered UTR polynucleotides that function as a 5′ UTR. Engineering the features in untranslated regions (UTRs) can improve the stability and protein production capability of the viral production constructs of the present disclosure.

[0318] The present disclosure presents viral expression constructs which comprise an engineered untranslated region (UTR) of the present disclosure. In certain embodiments, the viral expression construct comprises an engineered untranslated region (UTR) of the present disclosure. In certain embodiments, the viral expression construct comprises an engineered 5′ UTR of the present disclosure.

[0319] Natural 5′ UTRs comprise features which play important roles in translation initiation. They harbor signatures such as a Kozak sequences which are known to be involved in the process by which the ribosome initiates translation of many genes. The present disclosure provides engineered polynucleotide sequences which comprise at least one 5′ UTR function. Such “engineered 5′ UTR polynucleotides” or “engineered 5′ UTRs” may also comprise the start codon of the protein whose expression is being driven, e.g., a structural AAV capsid protein (VP1, VP2 or VP3) or a non-structural AAV replication protein (Rep78 or Rep52).

[0320] According to the present disclosure, the engineered 5′ UTR polynucleotides may range independently from 15-1,000 nucleotides in length (e.g., greater than 30, 40, 45, 50, 55, 60, 70, 80, 90, 100, 120, 140, 160, 180, 200, 250, 300, 350, 400, 450, 500, 600, 700, 800, and 900 nucleotides or at least 30, 40, 45, 50, 55, 60, 70, 80, 90, 100, 120, 140, 160, 180, 200, 250, 300, 350, 400, 450, 500, 600, 700, 800, 900, and 1,000 nucleotides). Non-UTR sequences may be incorporated into the engineered 5′ UTRs. For example, introns or portions of introns sequences may be incorporated into the polynucleotides of the disclosure. Incorporation of intronic sequences may also increase AAV serotype protein (e.g., capsid) production.

[0321] Leader sequences may be comprised in the engineered polynucleotides. Such leader sequences may derive from or be identical to all or a portion of any AAV serotype selected from those taught herein.

[0322] According to the present disclosure, the polynucleotides may comprise a consensus sequence which is discovered through rounds of experimentation. As used herein a “consensus” sequence is a single sequence which represents a collective population of sequences allowing for variability at one or more sites.

[0323] In certain embodiments, variants of the polynucleotides of the disclosure may be generated. These variants may have the same or a similar activity as the reference polynucleotide. Alternatively, the variant may have an altered activity (e.g., increased or decreased) relative to a reference polynucleotide. Generally, variants of a particular polynucleotides of the disclosure will have at least about 40%, 45%, 50%, 55%, 60%, 65%, 70%, 75%, 80%, 85%, 90%, 91%, 92%, 93%, 94%, 95%, 96%, 97%, 98%, 99% but less than 100% sequence identity to that particular reference polynucleotide as determined by sequence alignment programs and parameters described herein and known to those skilled in the art. Such tools for alignment comprise those of the BLAST suite (Stephen F. Altschul, Thomas L. Madden, Alejandro A. Schaffer, Jinghui Zhang, Zheng Zhang, Webb Miller, and David J. Lipman (1997), “Gapped BLAST and PSI-BLAST: a new generation of protein database search programs”, Nucleic Acids Res. 25:3389-3402.) Other tools are described herein, specifically in the definition of “identity.”

[0324] The engineered polynucleotides of the present disclosure may be incorporated into a vector or plasmid alone or in combination with other polynucleotide sequences or features such as those disclosed in International Publications WO2007046703 and WO2007148971 (disclosing alternative start codons and AAV vectors produced in insect cells); WO2009104964 (disclosing optimization of expression of AAV proteins in insect cells and involving alteration of promoter strength, enhancer elements, temperature control); and WO2015137802 (disclosing alternative start codons, removal of start codons and AAV vectors produced in insect cells), the contents of which are each incorporated herein by reference in their entireties, insofar as they do not conflict with the present disclosure.

[0325] In certain embodiments, the engineered 5′ UTR comprises or consists of between 80-120 nucleotides, between 90-110 nucleotides, between 95-10⁵ nucleotides, between 98-100 nucleotides, or about 99 nucleotides. In certain embodiments, the engineered 5′ UTR comprises or consists of 24 nucleotides.

[0326] In certain embodiments, the engineered 5′ UTR is derived from AAV2. In certain embodiments, the engineered 5′ UTR is derived from AAV2. In certain embodiments, the engineered 5′ UTR is derived from AAV9. In certain embodiments, the engineered 5′ UTR is derived from AAVRh10. In certain embodiments, the engineered 5′ UTR is derived from AAVPHP.B. In certain embodiments, the engineered 5′ UTR is derived from an AAV serotype disclosed herein.

### 5′ UTR Hairpin Structure

[0327] In certain embodiments, the engineered 5′ UTR comprises a hairpin structure. In certain embodiments, the engineered 5′ UTR region comprises: a promoter 5′ (upstream) of a 5′ UTR which comprises an “A” region (a 5′ flanking region) which is 5′ (upstream) of a hairpin, a “B” region (a 3′ flanking region which can comprise a start codon and kozak nucleotides around the start codon) which is 3′ (downstream) from the stem loop, a “C” region representing the stem of a stem-loop structure, and a loop (which can range from 4-16 nucleotides). In certain embodiments, the hairpin structure can comprise all or a portion of a Kozak sequence, such as TTT. The promoter and 5′ UTR can be associated with either a CAP gene (which encodes the structural capsid proteins VP1, VP2 and/or VP3) or a REP gene (which encodes the non-structural replication proteins Rep78 and Rep52).

[0328] In certain embodiments, the engineered 5′ UTR comprises a hairpin structure encoded by a hairpin nucleotide sequence. In certain embodiments, the hairpin nucleotide sequence comprises a leader sequence. In certain embodiments, the hairpin nucleotide sequence comprises a leader sequence and a start codon (e.g., ATG). In certain embodiments, the hairpin nucleotide sequence comprises a leader sequence, and a start codon (e.g., ATG) within a Kozak sequence or modified Kozak sequence.

[0329] In certain embodiments, the engineered 5′ UTR comprises a hairpin structure having a 5′ flanking region (i.e., upstream region) encoded by a 5′ flanking sequence. In certain embodiments, the 5′ flanking sequence may be of any length and may be derived in whole or in part from wild type AAV sequence or be completely artificial.

[0330] In certain embodiments, the engineered 5′ UTR comprises a hairpin structure having a 3′ flanking region (i.e., downstream region) encoded by a 3′ flanking sequence. In certain embodiments, the 3′ flanking sequence may be of any length and may be derived in whole or in part from wild type AAV sequence or be completely artificial.

[0331] The 5′ flanking sequence and 3′ flanking sequence can have the same size and origin, a different size, a different origin, or a different size and origin. Either flanking sequence may be absent. The 5′ flanking sequence can comprise or consist of 2-50, 2-40, 2-30, 2-20, or 2-15 nucleotides. The 3′ flanking sequence can comprise or consist of 2-50, 2-40, 2-30, 2-20, or 2-15 nucleotides. The 3′ flanking sequence may optionally contain the start codon of an AAV protein or proteins as well as other sequences such as a Kozak or modified Kozak sequence.

[0332] In certain embodiments, the engineered 5′ UTR comprises a hairpin structure which comprises a step-loop structure. In certain embodiments, the hairpin structure comprises a stem region and a loop region. In certain embodiments, the hairpin structure comprises a stem region, a loop region, and a stem-complement region. The stem-loop structure can comprise a stem region encoded by a stem sequence. The stem-loop structure can comprise a loop region encoded by a loop sequence. The stem-loop structure can comprise a stem-complement region encoded by a stem-complement sequence. Forming the stem of the stem-loop structure of the hairpin are paired or substantially paired nucleobases of between 2 and 50 pairs. The stem may contain one or more mismatches, bulges or loops. In certain embodiments, the stem sequence and the stem-complement sequence are 100% complementary (i.e., zero mismatches). In certain embodiments, the stem sequence and the stem-complement sequence comprise zero, one, two, three, four or five mismatches.

[0333] In certain embodiments, the engineered 5′ UTR comprises a hairpin structure presented in Table 2, or a combination of Upstream, Stem (Upstream), Loop, Stem (Downstream) and/or Downstream components listed in Table 2. In The position of the loop portion of the hairpin is underlined in the sequence with the canonical ATG start codon in Capital Letters.

TABLE 2
5' UTR Hairpin S tructures

| | Hairpin | | | | | |
|---|---|---|---|---|---|---|
| Name | Sequence | Upstream | Stem-U | Loop | Stem-D | Downstream |
| HP1 | atacgactcgacgaa | atacgactcgacga | aaccgtcggc | tttatggct | | |
| | gacttgatcaaccgtc | agacttgatc | SEQ ID | | | |
| | ggctttATGgct | SEQ ID NO: | NO: 1756 | | | |
| | SEQ ID NO: | 1752 | | | | |
| | 1736 | | | | | |
| HP2 | atacgactcgacgaa | atacgactcgacga | aaccAtcggc | tttatggct | | |
| | gacttgatcaaccAt | agacttgatc | SEQ ID | | | |
| | cggctttATGgct | SEQ ID NO: | NO: 1757 | | | |
| | SEQ ID NO: | 1752 | | | | |
| | 1737 | | | | | |
| HP3 | atacgactcgacgaa | atacgactcgacga | aaccgtAggc | tttatggct | | |
| | gacttgatcaaccgt | agacttgatc | SEQ ID | | | |
| | AggctttATGgct | SEQ ID NO: | NO: 1758 | | | |
| | SEQ ID NO: | 1752 | | | | |
| | 1738 | | | | | |
| HP4 | atacgactcgacgaa | atacgactcgacga | cggc | tttatggct | | |
| | gacttgatcctgactc | agacttgatcctgac | | | | |
| | ggctttATGgct | t | | | | |
| | SEQ ID NO: | SEQ ID NO: | | | | |
| | 1739 | 1753 | | | | |
| HP5 | atacgactcgacgaa | atacgactcgacga | agTtaaccgt | tttatggct | | |
| | gacttagTtaaccgtc | agactt | cggc | | | |
| | ggctttATGgct | SEQ ID NO: | SEQ ID | | | |
| | SEQ ID NO: | 1754 | NO: 1759 | | | |
| | 1740 | | | | | |
| HP6 | atacgactcgacgaa | atacgactcgacga | agTtaaccgt | tttatggct | | |
| | gacttagTtaaccgtc | agactt | cCgc | | | |
| | GgctttATGgct | SEQ ID NO: | SEQ ID | | | |
| | SEQ ID NO: | 1754 | NO: 1760 | | | |
| | 1741 | | | | | |
| HP7 | atacgactcgacgaa | atacgactcgacga | agTtaacTgt | tttatggct | | |
| | gacttagTtaacTgt | agactt | cCgc | | | |
| | cCgctttATGgct | SEQ ID NO: | SEQ ID | | | |
| | SEQ ID NO: | 1754 | NO: 1761 | | | |
| | 1742 | | | | | |
| HP8 | atacgactcgacgaa | atacgactcgacga | ctgcc | atctaa | ggcag | tttatggct |
| | gacctgccatctaag | agac | | | | |
| | gcagtttATGgct | SEQ ID NO: | | | | |
| | SEQ ID NO: | 1755 | | | | |
| | 1743 | | | | | |
| HP9 | atacgactctgccagc | atacgact | ctgccagctc | atctaa | gagctggca | tttatggct |
| | tcatctaagagctggc | | SEQ ID | | g | |
| | agtttATGgct | | NO: 1762 | | SEQ ID | |
| | SEQ ID NO: | | | | NO: 1767 | |
| | 1744 | | | | | |
| HP10 | atacgactctgccTg | atacgact | ctgccTgctc | atctaa | gagctggca | tttatggct |
| | ctcatctaagagctgg | | SEQ ID | | g | |
| | cagtttATGgct | | NO: 1763 | | SEQ ID | |
| | SEQ ID NO: | | | | NO: 1767 | |
| | 1745 | | | | | |
| HP11 | atacctgccagctctt | atac | ctgccagctct | atctaa | cgaagagct | tttatggct |
| | cgatctaacgaagag | | tcg | | ggcag | |
| | ctggcagtttATGg | | SEQ ID | | SEQ ID | |
| | ct | | NO: 1764 | | NO: 1768 | |
| | SEQ ID NO: | | | | | |
| | 1746 | | | | | |
| HP12 | atacctgccTgctctt | atac | ctgccTgctct | atctaa | cgaagagct | tttatggct |
| | cgatctaacgaagag | | tcg | | ggcag | |
| | ctggcagtttATGg | | SEQ ID | | SEQ ID | |
| | ct | | NO: 1765 | | NO: 1768 | |
| | SEQ ID NO: | | | | | |
| | 1747 | | | | | |
| HP13 | atacctgccTgctcA | atac | ctgccTgctc | atctaa | cgaagagct | tttatggct |
| | tcgatctaacgaaga | | Atcg | | ggcag | |
| | gctggcagtttATG | | SEQ ID | | SEQ ID | |
| | get | | NO: 1766 | | NO: 1768 | |
| | SEQ ID NO: | | | | | |
| | 1748 | | | | | |
| HP14 | atacctgccatctaag | atac | ctgcc | atctaa | ggcag | gactcgacgaag |
| | gcaggactcgacgaa | | | | | actttatggct |
| | gactttATGgct | | | | | SEQ ID NO: |
| | SEQ ID NO: | | | | | 1769 |
| | 1749 | | | | | |
| HP15 | atacctgccagctcat | atac | ctgccagctc | atctaa | gagctggca | gacttttatggct |
| | ctaagagctggcagg | | SEQ ID | | g | SEQ ID NO: |
| | acttttATGgct | | NO: 1762 | | SEQ ID | 1770 |
| | SEQ ID NO: | | | | NO: 1767 | |
| | 1750 | | | | | |
| HP16 | atacctgccTgctcat | atac | ctgccTgctc | atctaa | gagctggca | gacttttatggct |
| | ctaagagctggcagg | | SEQ ID | | g | SEQ ID NO: |
| | acttttATGgct | | NO: 1763 | | SEQ ID | 1770 |
| | SEQ ID NO: | | | | NO: 1767 | |
| | 1751 | | | | | |

[0334] In certain embodiments, the engineered 5′ UTR comprises a hairpin structure, or a component thereof, which is encoded by a hairpin nucleotide sequence selected from SEQ ID NO:1736-1751. In certain embodiments, the engineered 5′ UTR comprises a hairpin structure, or a component thereof, encoded by a nucleotide sequence having at least 60% identity, at least 65% identity, at least 70% identity, at least 75% identity, at least 80% identity, at least 85% identity, at least 90% identity or at least 95% identity to SEQ ID NO: 1736-1751.

### G: C Content

[0335] In certain embodiments, the engineered 5′ UTRs of the present disclosure can comprise a nucleotide sequence, such as a leader sequence, which has varied G:C content or percentage. In certain embodiments, the 5′ flanking region of the 5′ UTRs have a varied G:C content. In certain embodiments, the stem of the 5′ UTRs has a varied G:C content. In certain embodiments, the 3′ flanking region of the 5′ UTRs has a varied G:C content. In certain embodiments, the G:C content of the engineered 5′ UTR is 10-80%, 20-70%, 25%-65%, or 30%-60%. In certain embodiments, the G:C content of the engineered 5′ UTR is about 25%, about 30%, 34%, about 35%, about 40%, about 45%, about 50%, about 55%, 58%, about 60%, 62% or about 65%.

[0336] In certain embodiments, the engineered 5′ UTR comprises or consists of between 98-100 nucleotides, and comprises a G:C content of about 25%, about 30%, 34%, about 35%, about 40%, about 45%, about 50%, about 55%, 58%, about 60%, 62% or about 65%.

### Modified Kozak Sequences

[0337] The translational start site of eukaryotic mRNA is controlled in part by a nucleotide sequence referred to as a Kozak sequence as described in Kozak, M Cell. 1986 Jan. 31; 44(2):283-92 and Kozak, M. J Cell Biol. 1989 February; 108(2):229-41 the content of which is incorporated herein by reference in its entirety as related to Kozak sequences and uses thereof, insofar as it does not conflict with the present disclosure. Both naturally occurring and synthetic (i.e., modified or engineered) translational start sites of the Kozak form can be used in the production of polypeptides by molecular genetic techniques, as described in Kozak, M. Mamm Genome. 1996 August; 7(8):563-74, the content of which is incorporated herein by reference in its entirety as related to Kozak sequences and uses thereof, insofar as it does not conflict with the present disclosure. The Kozak consensus sequence is generally defined as GCCRCC(NNN)GC (SEQ ID NO: 1771), wherein R is a purine (i.e., A or G) and wherein (NNN) stands for a translation initiation start codon, such as a suboptimal start codon. In certain embodiments, Kozak sequences are modified to provide leaky ribosome scanning of the VP-coding region. Any corresponding increase of VP1 production will conversely reduce VP3 translation, such that marginal changes of VP1 initiation rate can induce large changes in VP1/VP3 ratio. As used herein, the terms “modified Kozak sequence” or “engineered Kozak sequence” represent an altered Kozak sequence, such as, for example, a Kozak sequence which comprises nucleotide mutations, additions, or deletions.

[0338] In certain embodiments, the engineered 5′ UTRs of the present disclosure can comprise a modified Kozak sequence, such as a modified weak Kozak sequence. In certain embodiments, the engineered 5′ UTRs of the present disclosure can comprise a modified Kozak sequence which comprises or is associated with a VP start codon and/or VP translation initiation region. In certain embodiments, the engineered 5′ UTRs of the present disclosure can comprise a modified Kozak sequence which comprises or is associated with a VP1 start codon and/or VP1 translation initiation region. In certain embodiments, the engineered 5′ UTRs of the present disclosure can comprise a modified Kozak sequence which comprises or is associated with a VP2 start codon and/or VP2 translation initiation region. In certain embodiments, the engineered 5′ UTRs of the present disclosure can comprise a modified Kozak sequence which comprises or is associated with a VP3 start codon and/or VP3 translation initiation region.

[0339] In certain embodiments, the engineered 5′ UTRs of the present disclosure can comprise a modified Kozak sequence selected from Table 3.

TABLE 3
Modified Kozak Sequences

| Sequence | SEQ ID NO: |
|---|---|
| tttagatggct | 1772 |
| tttagatgttg | 1773 |
| tttttatgttg | 1774 |

[0340] In certain embodiments, the engineered 5′ UTRs of the present disclosure can comprise a modified Kozak sequence selected from SEQ ID NOS: 1772-1774. In certain embodiments, the engineered 5′ UTRs of the present disclosure can comprise a modified Kozak sequence which has at least 60% identity, at least 65% identity, at least 70% identity, at least 75% identity, at least 80% identity, at least 85% identity, at least 90% identity or at least 95% identity to a modified Kozak sequence selected from SEQ ID NOS: 1772-1774.

[0341] In certain embodiments, an engineered 5′ UTR of the present disclosure can comprise the modified Kozak sequence of SEQ ID NO: 1772. In certain embodiments, an engineered 5′ UTR of the present disclosure can comprise the modified Kozak sequence of SEQ ID NO: 1773. In certain embodiments, an engineered 5′ UTR of the present disclosure can comprise the modified Kozak sequence of SEQ ID NO: 1774.

[0342] In certain embodiments, the modified Kozak sequence is engineered or selected to produce a VP1:VP2:VP3 ratio selected from: about or exactly 1:1:10; about or exactly 2:2:10; about or exactly 3:3:10; about or exactly 4:4:10; about or exactly 5:5:10; about or exactly 1-2:1-2:10; about or exactly 1-3:1-3:10; about or exactly 1-4:1-4:10; about or exactly 1-5:1-5:10; about or exactly 2-3:2-3:10; about or exactly 2-4:2-4:10; about or exactly 2-5:2-5:10; about or exactly 3-4:3-4:10; about or exactly 3-5:3-5:10; and about or exactly 4-5:4-5:10.

[0343] In certain embodiments, the present disclosure presents a method of producing rAAV particles in a viral production cell such as an insect cell. In certain embodiments, the method comprises (i) transfecting a viral production cell (e.g., Sf9 insect cell) with a payload construct and viral expression construct which comprises a nucleotide sequence encoding a modified Kozak sequence and a sequence encoding VP1, VP2, and/or VP3 capsid proteins, and (ii) culturing the insect cell under conditions suitable to produce rAAV particles.

### Viral Production Cells and Vectors

### Mammalian Cells

[0344] Viral production of the present disclosure disclosed herein describes processes and methods for producing AAV particles or viral vector that contacts a target cell to deliver a payload construct, e.g., a recombinant AAV particle or viral construct, which comprises a nucleotide encoding a payload molecule. The viral production cell may be selected from any biological organism, comprising prokaryotic (e.g., bacterial) cells, and eukaryotic cells, comprising, insect cells, yeast cells and mammalian cells.

[0345] In certain embodiments, the AAV particles of the present disclosure may be produced in a viral production cell that comprises a mammalian cell. Viral production cells may comprise mammalian cells such as A549, WEH1, 3T3, 10T1/2, BHK, MDCK, COS 1, COS 7, BSC 1, BSC 40, BMT 10, VERO. W138, HeLa, HEK293, HEK293T (293T), Saos, C2C12, L cells, HT1080, HepG2 and primary fibroblast, hepatocyte and myoblast cells derived from mammals. Viral production cells can comprise cells derived from mammalian species comprising, but not limited to, human, monkey, mouse, rat, rabbit, and hamster or cell type, comprising but not limited to fibroblast, hepatocyte, tumor cell, cell line transformed cell, etc.

[0346] AAV viral production cells commonly used for production of recombinant AAV particles comprise, but is not limited to HEK293 cells, COS cells, C127, 3T3, CHO, HeLa cells, KB cells, BHK, and other mammalian cell lines as described in U.S. Pat. Nos. 6,156,303, 5,387,484, 5,741,683, 5,691,176, 6,428,988 and 5,688,676; U.S. patent application 2002/0081721, and International Patent Publication Nos. WO 00/47757, WO 00/24916, and WO 96/17947, the contents of which are each incorporated herein by reference in their entireties, insofar as they do not conflict with the present disclosure. In certain embodiments, the AAV viral production cells are trans-complementing packaging cell lines that provide functions deleted from a replication-defective helper virus, e.g., HEK293 cells or other Ea trans-complementing cells.

[0347] In certain embodiments, the packaging cell line 293-10-3 (ATCC Accession No. PTA-2361) may be used to produce the AAV particles, as described in U.S. Pat. No. 6,281,010, the content of which is incorporated herein by reference in its entirety as related to the 293-10-3 packaging cell line and uses thereof, insofar as it does not conflict with the present disclosure.

[0348] In certain embodiments, of the present disclosure a cell line, such as a HeLA cell line, for trans-complementing E1 deleted adenoviral vectors, which encoding adenovirus Ela and adenovirus E1b under the control of a phosphoglycerate kinase (PGK) promoter can be used for AAV particle production as described in U.S. Pat. No. 6,365,394, the content of which is incorporated herein by reference in its entirety as related to the HeLA cell line and uses thereof, insofar as it does not conflict with the present disclosure.

[0349] In certain embodiments, AAV particles are produced in mammalian cells using a triple transfection method wherein a payload construct, parvoviral Rep and parvoviral Cap and a helper construct are comprised within three different constructs. The triple transfection method of the three components of AAV particle production may be utilized to produce small lots of virus for assays comprising transduction efficiency, target tissue (tropism) evaluation, and stability.

[0350] AAV particles to be formulated may be produced by triple transfection or baculovirus mediated virus production, or any other method known in the art. Any suitable permissive or packaging cell known in the art may be employed to produce the vectors. In certain embodiments, trans-complementing packaging cell lines are used that provide functions deleted from a replication-defective helper virus, e.g., 293 cells or other Ela trans-complementing cells.

[0351] The gene cassette may contain some or all of the parvovirus (e.g., AAV) cap and rep genes. In certain embodiments, some or all of the cap and rep functions are provided in trans by introducing a packaging vector(s) encoding the capsid and/or Rep proteins into the cell. In certain embodiments, the gene cassette does not encode the capsid or Rep proteins. Alternatively, a packaging cell line is used that is stably transformed to express the cap and/or rep genes.

[0352] Recombinant AAV virus particles are, in certain embodiments, produced and purified from culture supernatants according to the procedure as described in US2016/0032254, the content of which is incorporated herein by reference in its entirety as related to the production and processing of recombinant AAV virus particles, insofar as it does not conflict with the present disclosure. Production may also involve methods known in the art comprising those using 293T cells, triple transfection or any suitable production method.

[0353] In certain embodiments, mammalian viral production cells (e.g., 293T cells) can be in an adhesion/adherent state (e.g., with calcium phosphate) or a suspension state (e.g., with polyethyleneimine (PEI)). The mammalian viral production cell is transfected with plasmids required for production of AAV, (i.e., AAV rep/cap construct, an adenoviral helper construct, and/or ITR flanked payload construct). In certain embodiments, the transfection process can comprise optional medium changes (e.g., medium changes for cells in adhesion form, no medium changes for cells in suspension form, medium changes for cells in suspension form if desired). In certain embodiments, the transfection process can comprise transfection mediums such as DMEM or F17. In certain embodiments, the transfection medium can comprise serum or can be serum-free (e.g., cells in adhesion state with calcium phosphate and with serum, cells in suspension state with PEI and without serum).

[0354] Cells can subsequently be collected by scraping (adherent form) and/or pelleting (suspension form and scraped adherent form) and transferred into a receptacle. Collection steps can be repeated as necessary for full collection of produced cells. Next, cell lysis can be achieved by consecutive freeze-thaw cycles (−80° C. to 37° C.), chemical lysis (such as adding detergent triton), mechanical lysis, or by allowing the cell culture to degrade after reaching ˜0% viability. Cellular debris is removed by centrifugation and/or depth filtration. The samples are quantified for AAV particles by DNase resistant genome titration by DNA qPCR.

[0355] AAV particle titers are measured according to genome copy number (genome particles per milliliter). Genome particle concentrations are based on DNA qPCR of the vector DNA as previously reported (Clark et al. (1999) Hum. Gene Ther., 10:1031-1039; Veldwijk et al. (2002) Mol. Ther., 6:272-278, the contents of which are each incorporated herein by reference in their entireties as related to the measurement of particle concentrations, insofar as they do not conflict with the present disclosure).

### Insect Cells

[0356] Viral production of the present disclosure comprises processes and methods for producing AAV particles or viral vectors that contact a target cell to deliver a payload construct, e.g., a recombinant viral construct, which comprises a nucleotide encoding a payload molecule. In certain embodiments, the AAV particles or viral vectors of the present disclosure may be produced in a viral production cell that comprises an insect cell.

[0357] Growing conditions for insect cells in culture, and production of heterologous products in insect cells in culture are well-known in the art, see U.S. Pat. No. 6,204,059, the content of which is incorporated herein by reference in its entirety as related to the growth and use of insect cells in viral production, insofar as it does not conflict with the present disclosure.

[0358] Any insect cell which allows for replication of parvovirus and which can be maintained in culture can be used in accordance with the present disclosure. AAV viral production cells commonly used for production of recombinant AAV particles comprise, but is not limited to, Spodoptera frugiperda, comprising, but not limited to the Sf9 or Sf21 cell lines, Drosophila cell lines, or mosquito cell lines, such as Aedes albopictus derived cell lines. Use of insect cells for expression of heterologous proteins is well documented, as are methods of introducing nucleic acids, such as vectors, e.g., insect-cell compatible vectors, into such cells and methods of maintaining such cells in culture. See, for example, Methods in Molecular Biology, ed. Richard, Humana Press, N J (1995); O'Reilly et al., Baculovirus Expression Vectors, A Laboratory Manual, Oxford Univ. Press (1994); Samulski et al., J. Vir.63:3822-8 (1989); Kajigaya et al., Proc. Nat'l. Acad. Sci. USA 88: 4646-50 (1991); Ruffing et al., J. Vir. 66:6922-30 (1992); Kimbauer et al.,Vir.219:37-44 (1996); Zhao et al., Vir.272:382-93 (2000); and Samulski et al., U.S. Pat. No. 6,204,059, the contents of which are each incorporated herein by reference in their entireties as related to the use of insect cells in viral production, insofar as they do not conflict with the present disclosure.

[0359] In one embodiment, the AAV particles are made using the methods described in WO2015/191508, the content of which is incorporated herein by reference in its entirety, insofar as it does not conflict with the present disclosure.

[0360] In certain embodiments, insect host cell systems, in combination with baculoviral systems (e.g., as described by Luckow et al., Bio/Technology 6: 47 (1988)) may be used. In certain embodiments, an expression system for preparing chimeric peptide is Trichoplusia ni, Tn 5B1-4 insect cells/baculoviral system, which can be used for high levels of proteins, as described in U.S. Pat. No. 6,660,521, the content of which is incorporated herein by reference in its entirety, insofar as it does not conflict with the present disclosure.

[0361] Expansion, culturing, transfection, infection and storage of insect cells can be carried out in any cell culture media, cell transfection media or storage media known in the art, comprising Hyclone SFX Insect Cell Culture Media, Expression System ESF AF Insect Cell Culture Medium, Basal IPL-41 Insect Cell Culture Media, ThermoFisher Sf900II media, ThermoFisher Sf900III media, or ThermoFisher Grace's Insect Media. Insect cell mixtures of the present disclosure can also comprise any of the formulation additives or elements described in the present disclosure, comprising (but not limited to) salts, acids, bases, buffers, surfactants (such as Poloxamer 188/Pluronic F-68), and other known culture media elements. Formulation additives can be incorporated gradually or as “spikes” (incorporation of large volumes in a short time).

[0362] In some embodiments, the insect cell culture medium is serum-free and protein-free. In some embodiments, the medium comprises L-glutamate and poloxamer 188. In some embodiments, the medium is ESF AF Insect Cell Culture Medium. In some embodiments, the selected medium (e.g., ESF AF Insect Cell Culture Medium) increases titer at least 1.5 fold or at least 2 fold.

### Baculovirus-Production Systems

[0363] In certain embodiments, processes of the present disclosure can comprise production of AAV particles or viral vectors in a baculoviral system using a viral expression construct and a payload construct vector. In certain embodiments, the baculoviral system comprises baculovirus expression vectors (BEVs) and/or baculovirus infected insect cells (BIICs). In certain embodiments, BIICs can be generated by infecting viral production cells (e.g., Sf9 insect cells) with one or more BEVs. In certain embodiments, a viral expression construct or a payload construct of the present disclosure can be a bacmid, also known as a baculovirus plasmid or recombinant baculovirus genome. In certain embodiments, a viral expression construct or a payload construct of the present disclosure can be polynucleotide incorporated by homologous recombination (transposon donor/acceptor system) into a bacmid by standard molecular biology techniques known and performed by a person skilled in the art.

[0364] In certain embodiments, such engineering of the bacmid genome (e.g., to encode a viral expression construct and/or a viral payload construct) produces a BEV. In certain embodiments, a BEV comprising a viral expression construct is also called an “expressionBac”, and a BEV comprising a viral payload construct is also called a “payloadBac”.

[0365] In certain embodiments, the process comprises transfection of a single viral replication cell population to produce a single baculovirus (BEV) group which comprises both the viral expression construct and the payload construct. These baculoviruses may be used to infect a viral production cell for production of AAV particles or viral vector.

[0366] In certain embodiments, BEVs can be engineered using a system comprising a donor plasmid and a baculoviral construct, wherein a target sequence is transferred from the donor plasmid to the baculovirus construct (e.g., a baculovirus vector). A “target sequence” as used herein refers to a sequence comprising a nucleic acid or gene of interest that is inserted into an expressionBac or payload Bac in a BEV. In certain embodiments, the target sequence is transferred from the donor plasmid to the baculovirus construct via transposition. In certain embodiments, the target sequence comprises a sequence that encodes an AAV structural capsid protein (e.g., VP1, VP2, VP3, or a combination thereof). In certain embodiments, the target sequence comprises a sequence that encodes an AAV non-structural protein (e.g., Rep 52, Rep 78, or a combination thereof). In certain embodiments, the target sequence comprises a sequence that encodes an AAV structural capsid protein (e.g., VP1, VP2, VP3, or a combination thereof) and/or an AAV non-structural protein (e.g., Rep 52, Rep 78, or a combination thereof). In certain embodiments, the target sequence comprises a sequence that encodes a payload (e.g., SEQ ID NO: 979). In certain embodiments, BEVs can be engineered using a Bac-to-Bac™ baculovirus expression system (e.g., according to manufacturer's protocol; ThermoFisher/Invitrogen). In certain embodiments, the Bac-to-Bac™ baculovirus expression system comprises a donor vector (e.g., pFastBac™ vector or pUC57 vector). In certain embodiments, the Bac-to-Bac™ baculovirus expression system comprises a baculovirus shuttle vector (e.g., a bacmid sequence, e.g., a bMON14272 baculovirus shuttle vector). In certain embodiments, the Bac-to-Bac™ baculovirus expression system comprises chemically competent cells hosting a baculovirus shuttle vector. In certain embodiments, the chemically competent cells may be DH10Bac™ E. coli cells comprising a bMON14272 baculovirus shuttle vector.

[0367] In some embodiments, the pFastBac™ donor vector comprises a sequence that encodes an AAV structural capsid protein (e.g., VP1, VP2, VP3, or a combination thereof) and/or an AAV non-structural protein (e.g., Rep 52, Rep 78, or a combination thereof). In some embodiments, the pFastBac™ donor vector comprises SEQ ID NO: 1781. The pFastBac™ donor vector sequence is given here:

(SEQ ID NO: 1781)
5’gacgaaagggcctcgtgatacgcctatttttataggttaatgtcatgataataatggtttcttagacgtcaggtggcact
tttcggggaaatgtgcgcggaacccctatttgtttatttttctaaatacattcaaatatgtatccgctcatgagacaataaccctgataaatgc
ttcaataatattgaaaaaggaagagtatgagtattcaacatttccgtgtcgcccttattcccttttttgcggcattttgccttcctgtttttgct
cacccagaaacgctggtgaaagtaaaagatgctgaagatcagttgggtgcacgagtgggttacatcgaactggatctcaacagcggtaa
gatccttgagagttttcgccccgaagaacgttttccaatgatgagcacttttaaagttctgctatgtggcgcggtattatcccgtattgacgc
cgggcaagagcaactcggtcgccgcatacactattctcagaatgacttggttgagtactcaccagtcacagaaaagcatcttacggatg
gcatgacagtaagagaattatgcagtgctgccataaccatgagtgataacactgcggccaacttacttctgacaacgatcggaggacc
gaaggagctaaccgcttttttgcacaacatgggggatcatgtaactcgccttgatcgttgggaaccggagctgaatgaagccataccaa
acgacgagcgtgacaccacgatgcctgtagcaatggcaacaacgttgcgcaaactattaactggcgaactacttactctagcttcccg
gcaacaattaatagactggatggaggcggataaagttgcaggaccacttctgcgctcggcccttccggctggctggtttattgctgataa
atctggagccggtgagcgtgggtctcgcggtatcattgcagcactggggccagatggtaagccctcccgtatcgtagttatctacacga
cggggagtcaggcaactatggatgaacgaaatagacagatcgctgagataggtgcctcactgattaagcattggtaactgtcagacca
agtttactcatatatactttagattgatttaaaacttcatttttaatttaaaaggatctaggtgaagatcctttttgataatctcatgaccaaaa
tcccttaacgtgagttttcgttccactgagcgtcagaccccgtagaaaagatcaaaggatcttcttgagatcctttttttctgcgcgtaatctgc
tgcttgcaaacaaaaaaaccaccgctaccagcggtggtttgtttgccggatcaagagctaccaactctttttccgaaggtaactggcttc
agcagagcgcagataccaaatactgttcttctagtgtagccgtagttaggccaccacttcaagaactctgtagcaccgcctacatacctc
gctctgctaatcctgttaccagtggctgctgccagtggcgataagtcgtgtcttaccgggttggactcaagacgatagttaccggataag
gcgcagcggtcgggctgaacggggggttcgtgcacacagcccagcttggagcgaacgacctacaccgaactgagatacctacagc
gtgagctatgagaaagcgccacgcttcccgaagggagaaaggcggacaggtatccggtaagcggcagggtcggaacaggagag
cgcacgagggagcttccagggggaaacgcctggtatctttatagtcctgtcgggtttcgccacctctgacttgagcgtcgatttttgtgat
gctcgtcaggggggcggagcctatggaaaaacgccagcaacgcggcctttttacggttcctggccttttgctggccttttgctcacatgt
tctttcctgcgttatcccctgattctgtggataaccgtattaccgcctttgagtgagctgataccgctcgccgcagccgaacgaccgagc
gcagcgagtcagtgagcgaggaagcggaagagcgcccaatacgcaaaccgcctctccccgcgcgttggccgattcattaatgcag
ctggcacgacaggtttcccgactggaaagcgggcagtgagcgcaacgcaattaatgtgagttagctcactcattaggcaccccaggc
tttacactttatgcttccggctcgtatgttgtgtggaattgtgagcggataacaatttcacacaggaaacagctatgaccatgattacgcca
agcttgcatgcaggcctctgcagtcgacaccggttaagcgggtgtgggcggacaataaagtcttaaactgaacaaaatagatctaaac
tatgacaataaagtcttaaactagacagaatagttgtaaactgaaatcagtccagttatgctgtgaaaaagcatactggacttttgttatgg
ctaaagcaaactcttcattttctgaagtgcaaattgcccgtcgtattaaagaggggcgtggccaagggcatggtaaagactatattcgcg
gcgttgtgacaatttaccgaacaactccgcggccgggaagccgatctcggcttgaacgaattgttaggtggcggtacttgggtcgatat
caaagtgcatcacttcttcccgtatgcccaactttgtatagagagccactgcgggatcgtcaccgtaatctgcttgcacgtagatcacata
agcaccaagcgcgttggcctcatgcttgaggagattgatgagcgcggtggcaatgccctgcctccggtgctcgccggagactgcga
gatcatagatatagatctcactacgcggctgctcaaacttgggcagaacgtaagccgcgagagcgccaacaaccgcttcttggtcgaa
ggcagcaagcgcgatgaatgtcttactacggagcaagttcccgaggtaatcggagtccggctgatgttgggagtaggtggctacgtct
ccgaactcacgaccgaaaagatcaagagcagcccgcatggatttgacttggtcagggccgagcctacatgtgcgaatgatgcccata
cttgagccacctaactttgttttagggcgactgccctgctgcgtaacatcgttgctgctgcgtaacatcgttgctgctccataacatcaaac
atcgacccacggcgtaacgcgcttgctgcttggatgcccgaggcatagactgtacaaaaaaacagtcataacaagccatgaaaaccg
ccactgcgccgttaccaccgctgcgttcggtcaaggttctggaccagttgcgtgagcgcatacgctacttgcattacagtttacgaaccg
aacaggcttatgtcaactgggttcgtgccttcatccgtttccacggtgtgcgtcacccggcaaccttgggcagcagcgaagtcgaggc
atttctgtcctggctggcgaacgagcgcaaggtttcggtctccacgcatcgtcaggcattggcggccttgctgttcttctacggcaaggt
gctgtgcacggatctgcccttgcttcaggagatcggtagacctcggccgtcgcggcgcttgccggtggtgctgaccccggatgaagt
ggttcgcatcctcggttttctggaaggcgagcatcgtttgttcgcccaggactctagctatagttctagtggttggctacgtacccgtagtg
gctatggcagggcttgccgccccgacgttggctgcgagccctgggccttcacccgaacttgggggttggggtggggaaaaggaag
aaacgcgggcgtattggtcccaatggggtctcggtggggtatcgacagagtgccagccctgggaccgaaccccgcgtttatgaacaa
acgacccaacacccgtgcgttttattctgtctttttattgccgtcatagcgcgggttccttccggtattgtctccttccgtgtttcagttagcct
cccccatctcccggtaccgcatgctatgcatcagctgctagcttacagattacgagtcaggtatctggtgccaatggggcgaggctctg
aatacacgccattagtgtccacagtaaagtccacattaacagacttgttgtagttggaagtgtactgaatttcgggattccagcgtttgctg
ttttccttctgcagctcccactcgatctccacgctgacctgtcccgtggagtactgtgtgatgaaggaagcaaactttgccgcactgaag
gtggtcgaaggattcgcaggtaccggggtgttcttgatgagaatctgtggaggagggtgtttaagtccgaatccacccatgaggggag
aggggtgaaaatgtccgtccgtgtgtggaatctttgcccagatgggcccctgaaggtacacatctctgtcctgccagaccatgcctgga
agaacgccttgtgtgttgacatctgcggtagctgcttgtctgttgcctctctggaggttggtagatacagaaccatactgctccgtagcca
cgggattggttgtcctgatttcctcttcgtctgtaatcatgaccttttcaatgtccacatttgttttctctgagccttgcttcccaaagatgagaa
ccccgctctgaggaaaaaacttttcttcatcgtccttgtggcttgccatggccgggcccggattcaccagagagtctctgccattgaggt
ggtacttggtagctccagtccacgagtattcactgttgttgttatccgcagatgtctttgatactcgctgctggcggtaacagggtccagg
aagccagttcctagactggtcccgaatgtcactcgctccggcctgagaaaactgaagccttgactgcgtggtggttccacttggagtgtt
tgttctgctcaagtaatacaggtactggtcgatgagaggattcatgagacggtccagactctggctgtgagcgtagctgctgtggaaag
gaacgtcctcaaaagtgtagctgaaggtaaagttgtttccggtacgcagcatctgagaaggaaagtactccaggcagtaaaatgaaga
gcgtcctactgcctgactcccgttgttcagggtgaggtatccatactgtggcaccatgaagacgtctgctgggaacggcgggaggcat
ccttgatgcgccgagccgaggacgtacgggagctggtactccgagtcagtaaacacctgaaccgtgctggtaaggttattggcaatc
gtcgtcgtaccgtcattctgcgtgacctctttgacttgaatgttaaagagcttgaagttgagtctcttgggtcggaatccccagttgttgttg
atgagtctttgccagtcacgtggtgaaaagtggcagtggaatctgttgaagtcaaaatacccccaaggggtgctgtagccaaagtagtg
attgtcgttcgaggctcctgattggctggaaatttgtttgtagaggtggttgttgtaggtgggcagggcccaggttcgggtgctggtggtg
atgactctgtcgcccatccatgtggaatcgcaatgccaatttcccgaggaattacccactccgtcggcgccctcgttattgtctgccattg
gtgcgccactgcctgtagccatcgtattagttcccagaccagagggggctgctggtggctgtccgagaggctgggggtcaggtactg
agtctgcgtctccagtctgaccaaaattcaatctttttcttgcaggctgctggcccgcctttccggttcccgaggaggagtctggctccac
aggagagtgctctaccggcctcttttttcccggagccgtcttaacaggttcctcaaccaggcccagaggttcaagaaccctctttttcgcc
tggaagactgctcgtccgaggttgcccccaaaagaggtatcttctttaaggcgctcctgaaactccgcgtcggcgtggttgtacttgag
gtacgggttgtctccgctgtcgagctgccggtcgtaggctttgtcgtgctcgagggccgcggcgtctgcctcgttgaccggctctccctt
gtcgagtccgttgaagggtccgaggtacttgtacccaggaagcacaagacccctgctgtcgtccttatgccgctctgcgggctttggtg
gtggtgggccaggtttgagcttccaccactgtcttattccttcagagagagtgtcctcgagccaatcgggtagataaccgtcggcagcc
agtttaacaggatcccccgggtgatcaagtcttcgtcgagtgattgtaaataaaatgtaatttacagtatagtattttaattaatatacaaatg
atttgataataattcttatttaactataatatattgtgttgggttgaattaaaggtccgtatactccggaatattaatagatcatggagataatta
aaatgataaccatctcgcaaataaataagtattttactgttttcgtaacagttttgtaataaaaaaacctataaatattccggattattcatacc
gtcccaccatcgggcgcggatctgccgccctggcggggttttacgagattgtgattaaggtccccagcgaccttgacgagcatctgcc
cggcatttctgacagctttgtgaactgggtggccgagaaggagtgggagttgccgccagattctgacttggatctgaatctgattgagc
aggcacccctgaccgtggccgagaagctgcagcgcgactttctgacggagtggcgccgtgtgagtaaggccccggaggcccttttc
tttgtgcaatttgagaagggagagagctacttccacttacacgtgctcgtggaaaccaccggggtgaaatccttagttttgggacgtttcc
tgagtcagattcgcgaaaaactgattcagagaatttaccgcgggatcgagccgactttgccaaactggttcgcggtcacaaagaccag
aaacggcgccggaggcgggaacaaggtggtggacgagtgctacatccccaattacttgctccccaaaacccagcctgagctccagt
gggcgtggactaatttagaacagtatttaagcgcctgtttgaatctcacggagcgtaaacggttggtggcgcagcatctgacgcacgtg
tcgcagacgcaggagcagaacaaagagaatcagaatcccaattctgacgcgccggtgatcagatcaaaaacttcagccaggtacat
ggagctggtcgggtggctcgtggacaaggggattacctcggagaagcagtggatccaggaggaccaggcctcatacatctccttca
atgcggcctccaactcgcggtcccaaatcaaggctgccttggacaatgcgggaaagattatgagcctgactaaaaccgcccccgact
acctggtgggccagcagcccgtggaggacatttccagcaatcggatttataaaattttggaactaaacgggtacgatccccaatatgcg
gcttccgtctttctgggatgggccacgaaaaagttcggcaagaggaacaccatctggctgtttgggcctgcaactaccgggaagacca
acatcgcggaggccatagcccacactgtgcccttctacgggtgcgtaaactggaccaatgagaactttcccttcaacgactgtgtcgac
aagatggtgatctggtgggaggaggggaagatgaccgccaaggtcgtggagtcggccaaagccattctcggaggaagcaaggtgc
gcgtggaccagaaatgcaagtcctcggcccagatagacccgactcccgtgatcgtcacctccaacaccaacatgtgcgccgtgattg
acgggaactcaacgaccttcgaacaccagcagccgttgcaagaccggatgttcaaatttgaactcacccgccgtctggatcatgacttt
gggaaggtcaccaagcaggaagtcaaagactttttccggtgggcaaaggatcacgtggttgaggtggagcatgaattctacgtcaaa
aagggtggagccaagaaaagacccgcccccagtgacgcagatataagtgagcccaaacgggtgcgcgagtcagttgcgcagccat
cgacgtcagacgcggaagcttcgatcaactacgcagacaggtaccaaaacaaatgttctcgtcacgtgggcatgaatctgatgctgttt
ccctgcagacaatgcgagagaatgaatcagaattcaaatatctgcttcactcacggacagaaagactgtttagagtgctttcccgtgtca
gaatctcaacccgtttctgtcgtcaaaaaggcgtatcagaaactgtgctacattcatcatatcatgggaaaggtgccagacgcttgcact
gcctgcgatctggtcaatgtggatttggatgactgcatctttgaacaataaactcgaggaatcaagcttgcatgcctgcaggtcgactcta
gagcctgcagtctcgacaagcttgtcgagaagtactagaggatcataatcagccataccacatttgtagaggttttacttgctttaaaaaa
cctcccacacctccccctgaacctgaaacataaaatgaatgcaattgttgttgttaacttgtttattgcagcttataatggttacaaataaag
caatagcatcacaaatttcacaaataaagcatttttttcactgcattctagttgtggtttgtccaaactcatcaatgtatcttatcatgtctggat
ctgatcactgcttgagcctaggagatccgaaccagataagtgaaatctagttccaaactattttgtcatttttaattttcgtattagcttacgac
gctacacccagttcccatctattttgtcactcttccctaaataatccttaaaaactccatttccacccctcccagttcccaactattttgtccgc
ccacagcggggcattgcggccgcatctagatgcattcgcgaggtaccgagctcgaattcactggccgtcgttttacaacgtcgtgact
gggaaaaccctggcgttacccaacttaatcgccttgcagcacatccccctttcgccagctggcgtaatagcgaagaggcccgcaccg
atcgcccttcccaacagttgcgcagcctgaatggcgaatggcgcctgatgcggtattttctccttacgcatctgtgcggtatttcacaccg
catatggtgcactctcagtacaatctgctctgatgccgcatagttaagccagccccgacacccgccaacacccgctgacgcgccctga
cgggcttgtctgctcccggcatccgcttacagacaagctgtgaccgtctccgggagctgcatgtgtcagaggttttcaccgtcatcacc
gaaacgcgcga 3’.

[0368] In some embodiments, the pUC57 donor vector comprises a sequence that encodes a payload (e.g., SEQ ID NO: 979). In some embodiments, the pUC57 donor vector comprises SEQ ID NO: 1782. The pUC57 donor vector sequence is given here:

(SEQ ID NO: 1782)
5’tcgcgcgtttcggtgatgacggtgaaaacctctgacacatgcagctcccggagacggtcacagcttgtctgtaagc
ggatgccgggagcagacaagcccgtcagggcgcgtcagcgggtgttggcgggtgtcggggctggcttaactatgcggcatcagag
cagattgtactgagagtgcaccatatgcggtgtgaaataccgcacagatgcgtaaggagaaaataccgcatcaggcgccattcgccat
tcaggctgcgcaactgttgggaagggcgatcggtgcgggcctcttcgctattacgccagctggcgaaagggggatgtgctgcaagg
cgattaagttgggtaacgccagggttttcccagtcacgacgttgtaaaacgacggccagtgaagccccgctgtgggcggacaaaata
gttgggaactgggaggggtggaaatggagtttttaaggattatttagggaagagtgacaaaatagatgggaactgggtgtagcgtcgt
aagctaatacgaaaattaaaaatgacaaaatagtttggaactagatttcacttatctggttcggatctcgaccaattgacattattgaagcat
ttatcagggttattgtctcagacctgcaggcagctgcgcgctcgctcgctcactgaggccgcccgggcaaagcccgggcgtcgggc
gacctttggtcgcccggcctcagtgagcgagcgagcgcgcagagagggagtggccaactccatcactaggggttccttgtagttaat
gattaacccgccatgctacttatctacgtagccatgcgtcgacataacgcgtatatctagacgttacataacttacggtaaatggcccgcc
tggctgaccgcccaacgacccccgcccattgacgtcaataatgacgtatgttcccatagtaacgccaatagggactttccattgacgtc
aatgggtggagtatttacggtaaactgcccacttggcagtacatcaagtgtatcatatgccaagtacgccccctattgacgtcaatgacg
gtaaatggcccgcctggcattatgcccagtacatgaccttatgggactttcctacttggcagtacatctagtattagtcatcgctattaccat
ggtgatgcggttttggcagtacatcaatgggcgtggatagcggtttgactcacggggatttccaagtctccaccccattgacgtcaatgg
gagtttgttttggcaccaaaatcaacgggactttccaaaatgtcgtaacaactccgccccattgacgcaaatgggcggtaggcgtgtac
ggtgggaggtctatataagcagagctcgtttagtgaaccgtcagatcgcctggagacgccatccacgctgttttgacctccatagaaga
caccgggaccgatccagcctccgcggattcgaatcccggccgggaacggtgcattggaacgcggattccccgtgccaagagtgac
gtaagtaccgcctatagagtctataggcccacaaaaaatgctttcttcttttaatatacttttttgtttatcttatttctaatactttccctaatct
ctttctttcagggcaataatgatacaatgtatcatgcctctttgcaccattctaaagaataacagtgataatttctgggttaaggcaatagcaata
tttctgcatataaatatttctgcatataaattgtaactgatgtaagaggtttcatattgctaatagcagctacaatccagctaccattctgctttt
attttatggttgggataaggctggattattctgagtccaagctaggcccttttgctaatcatgttcatacctcttatcttcctcccacagctcct
gggcaacgtgctggtctgtgtgctggcccatcactttggcaaagaattgggattcgaacatcgattgaattccccggggatccaccatg
aacgcaagtgaattccgaaggagagggaaggagatggtggattacgtggccaactacatggaaggcattgagggacgccaggtcta
ccctgacgtggagcccgggtacctgcggccgctgatccctgccgctgcccctcaggagccagacacgtttgaggacatcatcaacg
acgttgagaagataatcatgcctggggtgacgcactggcacagcccctacttcttcgcctacttccccactgccagctcgtacccggcc
atgcttgcggacatgctgtgcggggccattggctgcatcggcttctcctgggcggcaagcccagcatgcacagagctggagactgtg
atgatggactggctcgggaagatgctggaactaccaaaggcatttttgaatgagaaagctggagaagggggaggagtgatccaggg
aagtgccagtgaagccaccctggtggccctgctggccgctcggaccaaagtgatccatcggctgcaggcagcgtccccagagctca
cacaggccgctatcatggagaagctggtggcttactcatccgatcaggcacactcctcagtggaaagagctgggttaattggtggagt
gaaattaaaagccatcccctcagatggcaacttcgccatgcgtgcgtctgccctgcaggaagccctggagagagacaaagcggctg
gcctgattcctttctttatggttgccaccctggggaccacaacatgctgctcctttgacaatctcttagaagtcggtcctatctgcaacaag
gaagacatatggctgcacgttgatgcagcctacgcaggcagtgcattcatctgccctgagttccggcaccttctgaatggagtggagttt
gcagattcattcaactttaatccccacaaatggctattggtgaattttgactgttctgccatgtgggtgaaaaagagaacagacttaacgg
gagcctttagactggaccccacttacctgaagcacagccatcaggattcagggcttatcactgactaccggcattggcagataccactg
ggcagaagatttcgctctttgaaaatgtggtttgtatttaggatgtatggagtcaaaggactgcaggcttatatccgcaagcatgtccagct
gtcccatgagtttgagtcactggtgcgccaggatccccgctttgaaatctgtgtggaagtcattctggggcttgtctgctttcggctaaag
ggttccaacaaagtgaatgaagctcttctgcaaagaataaacagtgccaaaaaaatccacttggttccatgtcacctcagggacaagttt
gtcctgcgctttgccatctgttctcgcacggtggaatctgcccatgtgcagcgggcctgggaacacatcaaagagctggcggccgac
gtgctgcgagcagagagggagtaggagtgaagccaggacctgcagaagcttgcctcgagcagcgctgctcgagagatctacgggt
ggcatccctgtgacccctccccagtgcctctcctggccctggaagttgccactccagtgcccaccagccttgtcctaataaaattaagtt
gcatcattttgtctgactaggtgtccttctataatattatggggtggaggggggtggtatggagcaaggggcaagttgggaagacaacct
gtagggcctgcggggtctattgggaaccaagctggagtgcagtggcacaatcttggctcactgcaatctccgcctcctgggttcaagc
gattctcctgcctcagcctcccgagttgttgggattccaggcatgcatgaccaggctcagctaatttttgtttttttggtagagacggggttt
caccatattggccaggctggtctccaactcctaatctcaggtgatctacccaccttggcctcccaaattgctgggattacaggcgtgaac
cactgctcccttccctgtccttactagatttaaatatgtcgtgcatcgatgctacgtagataagtagcatggcgggttaatcattaactacag
aggaacccctagtgatggagttggccactccctctctgcgcgctcgctcgctcactgaggccgggcgaccaaaggtcgcccgacgc
ccgggctttgcccgggcggcctcagtgagcgagcgagcgcgcagctgcctgcaggctgcctgcaggcatttaattaagcaagctgt
agccaaccactagaactatagctagagtcctgggcgaacaaacgatgctcgccttccagaaaaccgaggatgcgaaccacttcatcc
ggggtcagcaccaccggcaagcgccgcgacggccgaggtcttccgatctcctgaagccagggcagatccgtgcacagcaccttgc
cgtagaagaacagcaaggccgccaatgcctgacgatgcgtggagaccgaaaccttgcgctcgttcgccagccaggacagaaatgc
ctcgacttcgctgctgcccaaggttgccgggtgacgcacaccgtggaaacggatgaaggcacgaacccagttgacataagcctgttc
ggttcgtaaactgtaatgcaagtagcgtatgcgctcacgcaactggtccagaaccttgaccgaacgcagcggtggtaacggcgcagt
ggcggttttcatggcttgttatgactgtttttttgtacagtctatgcctcgggcatccaagcagcaagcgcgttacgccgtgggtcgatgttt
gatgttatggagcagcaacgatgttacgcagcagcaacgatgttacgcagcagggcagtcgccctaaaacaaagttaggtggctcaa
gtatgggcatcattcgcacatgtaggctcggccctgaccaagtcaaatccatgcgggctgctcttgatcttttcggtcgtgagttcggag
acgtagccacctactcccaacatcagccggactccgattacctcgggaacttgctccgtagtaagacattcatcgcgcttgctgccttcg
accaagaagcggttgttggcgctctcgcggcttacgttctgcccaagtttgagcagccgcgtagtgagatctatatctatgatctcgcag
tctccggcgagcaccggaggcagggcattgccaccgcgctcatcaatctcctcaagcatgaggccaacgcgcttggtgcttatgtgat
ctacgtgcaagcagattacggtgacgatcccgcagtggctctctatacaaagttgggcatacgggaagaagtgatgcactttgatatcg
acccaagtaccgccacctaacaattcgttcaagccgagatcggcttcccggccgcggagttgttcggtaaattgtcacaacgccgcga
atatagtctttaccatgcccttggccacgcccctctttaatacgacgggcaatttgcacttcagaaaatgaagagtttgctttagccataac
aaaagtccagtatgctttttcacagcataactggactgatttcagtttacaactattctgtctagtttaagactttattgtcatagtttagatctat
tttgttcagtttaagactttattgtccgcccacacccgcttggcgtaatcatggtcatagctgtttcctgtgtgaaattgttatccgctcacaat
tccacacaacatacgagccggaagcataaagtgtaaagcctggggtgcctaatgagtgagctaactcacattaattgcgttgcgctcac
tgcccgctttccagtcgggaaacctgtcgtgccagctgcattaatgaatcggccaacgcgcggggagaggcggtttgcgtattgggc
gctcttccgcttcctcgctcactgactcgctgcgctcggtcgttcggctgcggcgagcggtatcagctcactcaaaggcggtaatacgg
ttatccacagaatcaggggataacgcaggaaagaacatgtgagcaaaaggccagcaaaaggccaggaaccgtaaaaaggccgcgt
tgctggcgtttttccataggctccgcccccctgacgagcatcacaaaaatcgacgctcaagtcagaggtggcgaaacccgacaggac
tataaagataccaggcgtttccccctggaagctccctcgtgcgctctcctgttccgaccctgccgcttaccggatacctgtccgcctttct
cccttcgggaagcgtggcgctttctcatagctcacgctgtaggtatctcagttcggtgtaggtcgttcgctccaagctgggctgtgtgca
cgaaccccccgttcagcccgaccgctgcgccttatccggtaactatcgtcttgagtccaacccggtaagacacgacttatcgccactgg
cagcagccactggtaacaggattagcagagcgaggtatgtaggcggtgctacagagttcttgaagtggtggcctaactacggctaca
ctagaagaacagtatttggtatctgcgctctgctgaagccagttaccttcggaaaaagagttggtagctcttgatccggcaaacaaacca
ccgctggtagcggtggtttttttgtttgcaagcagcagattacgcgcagaaaaaaaggatctcaagaagatcctttgatcttttctacggg
gtctgacgctcagtggaacgaaaactcacgttaagggattttggtcatgagattatcaaaaaggatcttcacctagatccttttaaattaaa
aatgaagttttaaatcaatctaaagtatatatgagtaaacttggtctgacagttaccaatgcttaatcagtgaggcacctatctcagcgatct
gtctatttcgttcatccatagttgcctgactccccgtcgtgtagataactacgatacgggagggcttaccatctggccccagtgctgcaat
gataccgcgagacccacgctcaccggctccagatttatcagcaataaaccagccagccggaagggccgagcgcagaagtggtcct
gcaactttatccgcctccatccagtctattaattgttgccgggaagctagagtaagtagttcgccagttaatagtttgcgcaacgttgttgc
cattgctacaggcatcgtggtgtcacgctcgtcgtttggtatggcttcattcagctccggttcccaacgatcaaggcgagttacatgatcc
cccatgttgtgcaaaaaagcggttagctccttcggtcctccgatcgttgtcagaagtaagttggccgcagtgttatcactcatggttatgg
cagcactgcataattctcttactgtcatgccatccgtaagatgcttttctgtgactggtgagtactcaaccaagtcattctgagaatagtgtat
gcggcgaccgagttgctcttgcccggcgtcaatacgggataataccgcgccacatagcagaactttaaaagtgctcatcattggaaaa
cgttcttcggggcgaaaactctcaaggatcttaccgctgttgagatccagttcgatgtaacccactcgtgcacccaactgatcttcagcat
cttttactttcaccagcgtttctgggtgagcaaaaacaggaaggcaaaatgccgcaaaaaagggaataagggcgacacggaaatgttg
aatactcatactcttcctttttcaatattattgaagcatttatcagggttattgtctcatgagcggatacatatttgaatgtatttagaaaaataaa
caaataggggttccgcgcacatttccccgaaaagtgccacctgacgtctaagaaaccattattatcatgacattaacctataaaaatagg
cgtatcacgaggccctttcgtc 3’.

[0369] In some embodiments, the bMON14272 baculovirus shuttle vector comprises SEQ ID NO: 1783.

[0370] In certain embodiments, transfection of separate viral production cell (VPC) populations with one or more expressionBac and/or payloadBac produces at least one group (e.g., two groups) of baculovirus infected viral production cells, each comprising at least one viral expression construct or viral payload construct. In some embodiments, the VPC may be an insect cell (e.g., Sf9 cell) and the baculovirus infected viral production cell may be a baculovirus infected insect cell (BIICs). In some embodiments, the BIICs comprise at least one group of bacmids (e.g., expressionBacs and/or payloadBacs) which may be used to infect one or more additional viral production cells (VPC) (e.g., Sf9 cells) for expanded production of AAV particles or viral vector. In certain embodiments, one or more BIICs may comprise at least one viral payload construct (such cells may be referred to as payloadBIIC) which encodes at least one payload protein (e.g., AADC). In certain embodiments, one or more BIICs may comprise at least one viral expression construct (expressionBIIC) which encodes at least one viral capsid or replication protein (e.g., AAV2 Rep/Cap). In certain embodiments, at least one viral production cell (e.g., at least one Sf9 cell) may be co-incubated (e.g., co-infected) with at least one expressionBIIC and at least one payloadBIIC to produce at least one viral production cell comprising a viral expression construct and a viral payload construct, e.g., an AAV2 capsid containing a construct encoding an AADC protein. In certain embodiments, VPCs comprising expressionBacs and/or payloadBacs are used to infect additional VPCs to produce more expressionBacs and/or payloadBacs. In some embodiments, VPCs infected with expressionBacs and/or payloadBacs provide increased stability and prolonged storage of the expressionBacs and/or payloadBacs as compared to expressionBacs and/or payloadBacs outside of VPCs. In some embodiments, the expressionBacs and/or payloadBacs produced by infected VPCs are used to infect insect cells (e.g., Sf9 cells).

[0371] In certain embodiments, the at least one viral production cell (e.g., Sf9 cell) comprises a viral payload construct, e.g., a payloadBAC, comprising the nucleic acid sequence of SEQ ID NO: 979, which encodes the AADC amino acid sequence of SEQ ID NO: 978. In some embodiments, the at least one viral production cell (e.g., Sf9 cell) comprises a viral expression construct, e.g., an expressionBAC, encoding AAV2 capsid proteins. In some embodiments, the viral expression construct comprises the nucleic acid sequence of SEQ ID NO: 1778. In some embodiments, the viral expression construct encodes the amino acid sequence of SEQ ID NO: 16. In some embodiments, the viral expression construct encodes VP1, VP2, and VP3.

[0372] In certain embodiments, the process of preparing VPCs comprises transfection (e.g., co-transfection) of a single viral replication cell population to produce a single baculovirus (BIIC) group which comprises both the viral expression construct and the payload construct. These baculoviruses may be used to infect a viral production cell for production of AAV particles or viral vector.

[0373] In certain embodiments, BEVs are produced using a Bacmid Transfection agent, such as Promega FuGENE HD, WFI water, or ThermoFisher Cellfectin II Reagent. In certain embodiments, BEVs are produced and expanded in viral production cells, such as an insect cell.

[0374] In certain embodiments, the method utilizes seed cultures of viral production cells that comprise one or more BEVs, comprising baculovirus infected insect cells (BIICs). The seed BIICs have been transfected/transduced/infected with an Expression BEV which comprises a viral expression construct, and also a Payload BEV which comprises a payload construct. In certain embodiments, the seed cultures are harvested, divided into aliquots and frozen, and may be used at a later time to initiate transfection/transduction/infection of a naïve population of production cells. In certain embodiments, a bank of seed BIICs is stored at −80° C. or in LN₂ vapor.

[0375] Baculoviruses comprise several essential proteins which play a role in the function and replication of the baculovirus, including replication proteins, envelope proteins, and capsid proteins. The baculovirus genome thus comprises nucleotide sequences encoding such proteins. As a non-limiting example, the baculovirus genome can comprise nucleotide sequences which encode the protein for the baculovirus construct. In some embodiments, the baculovirus genome can encode proteins such as the GP64 baculovirus envelope protein and the VP39 baculovirus capsid protein for the baculovirus construct.

[0376] Baculovirus expression vectors (BEV) for producing AAV particles in insect cells, comprising but not limited to Spodoptera frugiperda (Sf9) cells, provide high titers of viral vector product. Recombinant baculovirus encoding the viral expression construct and payload construct initiates a productive infection of viral vector replicating cells. Infectious baculovirus particles released from the primary infection secondarily infect additional cells in the culture, exponentially infecting the entire cell culture population in a number of infection cycles that is a function of the initial multiplicity of infection, see Urabe, M. et al. J Virol. 2006 February; 80(4):1874-85, the content of which is incorporated herein by reference in its entirety as related to the production and use of BEVs and viral particles, insofar as it does not conflict with the present disclosure.

[0377] In certain embodiments, the production system of the present disclosure addresses baculovirus instability over multiple passages by utilizing a titerless infected-cells preservation and scale-up system. Small scale seed cultures of viral producing cells are transfected with viral expression constructs encoding the structural and/or non-structural components of the AAV particles. Baculovirus-infected viral producing cells are harvested into aliquots that may be cryopreserved in liquid nitrogen; the aliquots retain viability and infectivity for infection of large scale viral producing cell culture Wasilko D J et al. Protein Expr Purif. 2009 June; 65(2):122-32, the content of which is incorporated herein by reference in its entirety as related to the production and use of BEVs and viral particles, insofar as it does not conflict with the present disclosure.

[0378] A genetically stable baculovirus may be used to produce a source of the one or more of the components for producing AAV particles in invertebrate cells. In certain embodiments, defective baculovirus expression vectors may be maintained episomally in insect cells. In such an embodiment the corresponding bacmid vector is engineered with replication control elements, comprising but not limited to promoters, enhancers, and/or cell-cycle regulated replication elements.

[0379] In certain embodiments, baculoviruses may be engineered with a marker for recombination into the chitinase/cathepsin locus. The chia/v-cath locus is non-essential for propagating baculovirus in tissue culture, and the V-cath (EC 3.4.22.50) is a cysteine endoprotease that is most active on Arg-Arg dipeptide containing substrates. The Arg-Arg dipeptide is present in densovirus and parvovirus capsid structural proteins but infrequently occurs in dependovirus VP1.

[0380] In certain embodiments, stable viral producing cells permissive for baculovirus infection are engineered with at least one stable integrated copy of any of the elements necessary for AAV replication and vector production comprising, but not limited to, the entire AAV genome, Rep and Cap genes, Rep genes, Cap genes, each Rep protein as a separate transcription cassette, each VP protein as a separate transcription cassette, the AAP (assembly activation protein), or at least one of the baculovirus helper genes with native or non-native promoters.

[0381] In certain embodiments, the Baculovirus expression vectors (BEV) are based on the AcMNPV baculovirus or BmNPV baculovirus BmNPV. In certain embodiments, a bacmid of the present disclosure is based on (i.e., engineered variant of) an AcMNPV bacmid such as bmon14272, vAce25ko or vAclef11KO.

[0382] In certain embodiments, the Baculovirus expression vectors (BEV) is a BEV in which the baculoviral v-cath gene has been partially or fully deleted (“v-cath deleted BEV”) or mutated. In certain embodiments, the BEVs lack the v-cath gene or comprise a mutationally inactivated version of the v-cath gene. In certain embodiments, the BEVs lack the v-cath gene. In certain embodiments, the BEVs comprise a mutationally inactivated version of the v-cath gene.

[0383] Viral production bacmids of the present disclosure can comprise deletion of certain baculoviral genes or loci.

[0384] In certain embodiments, baculoviral inoculum banks can be produced using small-scale shake flasks, such as 3L or 5L shake flasks. However, this process is generally limited in the maximum cell density of the BIIC cells which can be produced, and thus requires centrifugation to concentrate resulting cells into a workable concentration. This correspondingly limits the volume (i.e., quantity) of the baculoviral inoculum bank (˜600 mL) which can be produced and stored using this method. This process also presents sterility concerns due to open operation.

[0385] In certain embodiments, baculoviral inoculum banks can be produced using bioreactors, such as 20-50L bioreactors. However, this process is also generally limited in the maximum cell density of the BIIC cells which can be produced, and thus requires significant processing through Tangential Flow Filtration (TFF) and/or centrifugation to concentrate resulting cells into a workable concentration (with 3 L of culture material being required to produce about 600 mL of concentrated BIIC formulation, corresponding with a 15-25% yield). This correspondingly limits the volume (i.e. quantity) of the baculoviral inoculum bank (˜3000 mL) which can be produced and stored using this method. This process also presents sterility concerns due to open operation.

[0386] In certain embodiments, perfusion technology can be used in the production of baculoviral inoculum banks. Perfusion systems are fluid circulation systems which use combinations of pumps, filters and screens to retain cells inside a bioreactor while continually removing cell waste products and replacing media depleted of nutrients by cell metabolism. In certain embodiments, the perfusion system is an alternating tangential flow (ATF) perfusion system. In certain embodiments, a perfusion system can be used in coordination with bioreactors to manage and cycle cell culture media within a bioreactor during the production of Baculovirus Infected Insect Cells (BIICs). In certain embodiments, a perfusion system can be used to support the production of high quality BIIC banks having an unexpectedly high cell density at large-scale. In certain embodiments, a perfusion system can be used to provide an infection-cell-to-product-cell yield of greater than 70% (e.g., 75-80%, 80-85%, 85-90%, 90-95% or 95-100%). In certain embodiments, a perfusion system can be used to perform a media switch within the bioreactor, such as the replacements of a cell culture media with a cryopreservation media which allows for BIIC cells to be frozen and preserved.

[0387] The present disclosure presents methods for producing a baculovirus infected insect cell (BIIC), e.g., expressionBIICs and/or payloadBIICs. In certain embodiments, the present disclosure presents methods for producing a baculovirus infected insect cell (BIIC) which comprises the following steps: (a) introducing a volume of cell culture medium into a bioreactor; (b) introducing at least one viral production cell (VPC) into the bioreactor and expanding the number of VPCs in the bioreactor to a target VPC cell density; (c) introduction at least one Baculoviral Expression Vector (BEV) into the bioreactor, wherein the BEV comprises an AAV viral expression construct or an AAV payload construct; (d) incubating the mixture of VPCs and BEVs in the bioreactor under conditions which allow at least one BEV to infect at least one VPC to produce a baculovirus infected insect cell (BIIC); (e) incubating the bioreactor under conditions which allow the number of BIICs in the bioreactor to reach a target BIIC cell density; and (f) harvesting the BIICs from the bioreactor. In certain embodiments, the bioreactor has a volume of at least 5 L, 10 L, 20 L, 50 L, 100 L, or 200 L. In certain embodiments, the volume of cell culture medium (i.e. working volume) in the bioreactor is at least 5 L, 10 L, 20 L, 50 L, 100 L, or 200 L.

[0388] In certain embodiments, the VPC density at BEV introduction is 1.0×10⁵-2.5×10⁵, 2.5×10⁵-5.0×10⁵, 5.0×10⁵-7.5×10⁵, 7.5×10⁵-1.0×10⁶, 1.0×10⁶-5.0×10⁶, 1.0×10⁶-2.0×10⁶, 1.5×10⁶-2.5×10⁶, 2.0×10⁶-3.0×10⁶, 2.5×10⁶-3.5×10⁶, 3.0×10⁶-4.0×10⁶, 3.5×10⁶-4.5×10⁶, 4.0×10⁶-5.0×10⁶, 4.5×10⁶-5.5×10⁶, 5.0×10⁶-1.0×10⁷, 5.0×10⁶-6.0×10⁶, 5.5×10⁶-6.5×10⁶, 6.0×10⁶-7.0×10⁶, 6.5×10⁶-7.5×10⁶, 7.0×10⁶-8.0×10⁶, 7.5×10⁶-8.5×10⁶, 8.0×10⁶-9.0×10⁶, 8.5×10⁶-9.5×10⁶, 9.0×10⁶-1.0×10⁷, 9.5×10⁶-1.5×10⁷, 1.0×10⁷-5.0×10⁷, or 5.0×10⁷-1.0×10⁸ cells/mL. In certain embodiments, the VPC density at BEV introduction is 5.0×10⁵, 6.0×10⁵, 7.0×10⁵, 8.0×10⁵, 9.0×10⁵, 1.0×10⁶, 1.5×10⁶, 2.0×10⁶, 2.5×10⁶, 3.0×10⁶, 3.5×10⁶, 4.0×10⁶, 4.5×10⁶, 5.0×10⁶, 5.5×10⁶, 6.0×10⁶, 6.5×10⁶, 7.0×10⁶, 7.5×10⁶, 8.0×10⁶, 8.5×10⁶, 9.0×10⁶, 9.5×10⁶, 1.0×10⁷, 1.5×10⁷, 2.0×10⁷, 2.5×10⁷, 3.0×10⁷, 4.0×10⁷, 5.0×10⁷, 6.0×10⁷, 7.0×10⁷, 8.0×10⁷, or 9.0×10⁷ cells/mL.

[0389] In certain embodiments, the target VPC cell density at BEV introduction is 1.5-4.0×10⁶ cells/mL. In certain embodiments, the target VPC cell density at BEV introduction is 2.0-3.5×10⁶ cells/mL.

[0390] In certain embodiments, the BEVs are introduced into the bioreactor at a target Multiplicity of Infection (MOI) of BEVs to VPCs. In certain embodiments, the BEV MOI is 0.0005-0.003, or more specifically 0.001-0.002.

[0391] In certain embodiments, the bioreactor can comprise a perfusion system for managing the cell culture medium within the bioreactor. In certain embodiments, the perfusion system is an alternating tangential flow (ATF) perfusion system. In certain embodiments, the perfusion system replaces at least a portion of the culture medium in the bioreactor while retaining at least 90% of the VPCs and BIICs within the bioreactor. In certain embodiments, the perfusion system removes cell waste products from the cell culture medium within the bioreactor. In certain embodiments, the perfusion system replaces cell culture media which has been depleted of nutrients by cellular metabolism. In certain embodiments, the perfusion system replaces the cell culture media with a cryopreservation media which allows for BIIC cells to be frozen and preserved. In certain embodiments, the perfusion system replaces the cell culture media with a cell culture media supplemented with growth or production boosting factors to increase the quality and quantity of the AAV product.

[0392] In certain embodiments, the BIICs are harvested from the bioreactor at a specific BIIC cell density. In certain embodiments, the BIICs harvested from the bioreactor have a specific BIIC cell density. In certain embodiments, the BIIC cell density at harvesting is 6.0-18.0×10⁶ cells/mL, 8.0-16.5×10⁶ cells/mL, 10.0-16.5×10⁶ cells/mL.

[0393] In some embodiments, BIICs (expressionBIICs, payloadBIICs) are used to transfect viral production cells, e.g., Sf9 cells. In some embodiments, baculovirus (expressionBacs, payloadBacs) are used to transfect viral production cells, e.g., Sf9 cells. Other

[0394] In certain embodiments expression hosts comprise, but are not limited to, bacterial species within the genera Escherichia, Bacillus, Pseudomonas, or Salmonella.

[0395] In certain embodiments, a host cell which comprises AAV rep and cap genes stably integrated within the cell's chromosomes, may be used for AAV particle production. In a non-limiting example, a host cell which has stably integrated in its chromosome at least two copies of an AAV rep gene and AAV cap gene may be used to produce the AAV particle according to the methods and constructs described in U.S. Pat. No. 7,238,526, the content of which is incorporated herein by reference in its entirety as related to the production of viral particles, insofar as it does not conflict with the present disclosure.

[0396] In certain embodiments, the AAV particle can be produced in a host cell stably transformed with a molecule comprising the nucleic acid sequences which permit the regulated expression of a rare restriction enzyme in the host cell, as described in US20030092161 and EP1183380, the contents of which are each incorporated herein by reference in their entireties as related to the production of viral particles, insofar as they do not conflict with the present disclosure.

[0397] In certain embodiments, production methods and cell lines to produce the AAV particle may comprise, but are not limited to those taught in PCT/US1996/010245, PCT/US1997/015716, PCT/US1997/015691, PCT/US1998/019479, PCT/US1998/019463, PCT/US2000/000415, PCT/US2000/040872, PCT/US2004/016614, PCT/US2007/010055, PCT/US1999/005870, PCT/US2000/004755, US Patent Application Nos. U.S. Ser. No. 08/549,489, U.S. Ser. No. 08/462,014, U.S. Ser. No. 09/659,203, U.S. Ser. No. 10/246,447, U.S. Ser. No. 10/465,302, US Patent Nos. U.S. Pat. Nos. 6,281,010, 6,270,996, 6,261,551, 5,756,283 (Assigned to NIH), U.S. Pat. Nos. 6,428,988, 6,274,354, 6,943,019, 6,482,634, (Assigned to NIH: U.S. Pat. Nos. 7,238,526, 6,475,769), U.S. Pat. No. 6,365,394 (Assigned to NIH), U.S. Pat. Nos. 7,491,508, 7,291,498, 7,022,519, 6,485,966, 6,953,690, 6,258,595, EP2018421, EP1064393, EP1163354, EP835321, EP931158, EP950111, EP1015619, EP1183380, EP2018421, EP1226264, EP1636370, EP1163354, EP1064393, US20030032613, US20020102714, US20030073232, US20030040101 (Assigned to NIH), US20060003451, US20020090717, US20030092161, US20070231303, US20060211115, US20090275107, US2007004042, US20030119191, US20020019050, the contents of which are each incorporated herein by reference in their entireties, insofar as they do not conflict with the present disclosure.

### Viral Production Systems

### Large-Scale Production

[0398] In certain embodiments, AAV particle production may be modified to increase the scale of production. Large scale viral production methods according to the present disclosure may comprise any of the processes or processing steps taught in U.S. Pat. Nos. 5,756,283, 6,258,595, 6,261,551, 6,270,996, 6,281,010, 6,365,394, 6,475,769, 6,482,634, 6,485,966, 6,943,019, 6,953,690, 7,022,519, 7,238,526, 7,291,498 and 7,491,508 or International Publication Nos. WO1996039530, WO1998010088, WO1999014354, WO1999015685, WO1999047691, WO2000055342, WO2000075353 and WO2001023597, the contents of each of which are herein incorporated by reference by reference in their entirety.

[0399] Methods of increasing AAV particle production scale typically comprise increasing the number of viral production cells. In certain embodiments, viral production cells comprise adherent cells. To increase the scale of AAV particle production by adherent viral production cells, larger cell culture surfaces are required. In certain embodiments, large-scale production methods comprise the use of roller bottles to increase cell culture surfaces. Other cell culture substrates with increased surface areas are known in the art. Examples of additional adherent cell culture products with increased surface areas comprise, but are not limited to iCELLis (Pall Corp, Port Wash., N.Y.), CELLSTACK®, CELLCUBE® (Coming Corp., Corning, N.Y.) and NUNC™ CELL FACTORY™ (Thermo Scientific, Waltham, Mass.) In certain embodiments, large-scale adherent cell surfaces may comprise from about 1,000 cm² to about 100,000 cm².

[0400] In certain embodiments, large-scale viral production methods of the present disclosure may comprise the use of suspension cell cultures. Suspension cell culture can allow for significantly increased numbers of cells. Typically, the number of adherent cells that can be grown on about 10-50 cm² of surface area can be grown in about 1 cm³ volume in suspension.

[0401] In certain embodiments, large-scale cell cultures may comprise from about 107 to about 10⁹ cells, from about 108 to about 10¹⁰ cells, from about 109 to about 10¹² cells or at least 10¹² cells. In certain embodiments, large-scale cultures may produce from about 109 to about 10¹², from about 10¹⁰ to about 1013, from about 10¹¹ to about 10¹⁴, from about 10¹² to about 10¹⁵ or at least 10¹⁵ AAV particles.

[0402] Transfection of replication cells in large-scale culture formats may be carried out according to any methods known in the art. For large-scale adherent cell cultures, transfection methods may comprise, but are not limited to the use of inorganic compounds (e.g., calcium phosphate,) organic compounds (e.g., polyethyleneimine (PEI)) or the use of non-chemical methods (e.g., electroporation). With cells grown in suspension, transfection methods may comprise, but are not limited to the use of inorganic compounds (e.g., calcium phosphate,) organic compounds (e.g., polyethyleneimine (PEI)) or the use of non-chemical methods (e.g., electroporation). In certain embodiments, transfection of large-scale suspension cultures may be carried out according to the section entitled “Transfection Procedure” described in Feng, L. et al., 2008. Biotechnol Appl Biochem. 50:121-32, the contents of which are herein incorporated by reference in their entirety. According to such embodiments, PEI-DNA complexes may be formed for introduction of plasmids to be transfected. In certain embodiments, cells being transfected with PEI-DNA complexes may be ‘shocked’ prior to transfection. This comprises lowering cell culture temperatures to 4° C. for a period of about 1 hour. In certain embodiments, cell cultures may be shocked for a period of from about 10 minutes to about 5 hours. In certain embodiments, cell cultures may be shocked at a temperature of from about 0° C. to about 20° C.

[0403] In certain embodiments, transfections may comprise one or more vectors for expression of an RNA effector molecule to reduce expression of nucleic acids from one or more payload construct. Such methods may enhance the production of AAV particles by reducing cellular resources wasted on expressing payload constructs. In certain embodiments, such methods may be carried according to those taught in US Publication No. US2014/0099666, the contents of which are herein incorporated by reference in their entirety.

### Bioreactors

[0404] In certain embodiments, cell culture bioreactors may be used for large scale production of AAV particles. In certain embodiments, bioreactors comprise stirred tank reactors. Such reactors generally comprise a vessel, typically cylindrical in shape, with a stirrer (e.g., impeller.) In certain embodiments, such bioreactor vessels may be placed within a water jacket to control vessel temperature and/or to minimize effects from ambient temperature changes.

[0405] Bioreactor vessel volume may range in size from about 500 ml to about 2 L, from about 1 L to about 5 L, from about 2.5 L to about 20 L, from about 10 L to about 50 L, from about 25 L to about 100 L, from about 75 L to about 500 L, from about 250 L to about 2,000 L, from about 1,000 L to about 10,000 L, from about 5,000 L to about 50,000 L or at least 50,000 L. Vessel bottoms may be rounded or flat. In certain embodiments, animal cell cultures may be maintained in bioreactors with rounded vessel bottoms.

[0406] In certain embodiments, bioreactor vessels may be warmed through the use of a thermocirculator. Thermocirculators pump heated water around water jackets. In certain embodiments, heated water may be pumped through pipes (e.g., coiled pipes) that are present within bioreactor vessels. In certain embodiments, warm air may be circulated around bioreactors, comprising, but not limited to air space directly above culture medium. Additionally, pH and CO₂ levels may be maintained to optimize cell viability.

[0407] In certain embodiments, bioreactors may comprise hollow-fiber reactors. Hollow-fiber bioreactors may support the culture of both anchorage dependent and anchorage independent cells. Further bioreactors may comprise, but are not limited to, packed-bed or fixed-bed bioreactors. Such bioreactors may comprise vessels with glass beads for adherent cell attachment. Further packed-bed reactors may comprise ceramic beads.

[0408] In certain embodiments, viral particles are produced through the use of a disposable bioreactor. In certain embodiments, bioreactors may comprise GE WAVE bioreactor, a GE Xcellerex Bioreactor, a Sartorius Biostat Bioreactor, a ThermoFisher Hyclone Bioreactor, or a Pall Allegro Bioreactor.

[0409] In certain embodiments, AAV particle production in cell bioreactor cultures may be carried out according to the methods or systems taught in U.S. Pat. Nos. 5,064,764, 6,194,191, 6,566,118, 8,137,948 or US Patent Application No. US2011/0229971, the contents of each of which are herein incorporated by reference in their entirety.

[0410] In certain embodiments, perfusion technology can be used in the production of viral particles. Perfusion systems are fluid circulation systems which use filters and screens to retain cells inside a bioreactor while continually removing cell waste products and media depleted of nutrients by cell metabolism. In certain embodiments, the perfusion system is an alternating tangential flow (ATF) perfusion system. In certain embodiments, a perfusion system can be used in coordination with bioreactors to manage and cycle cell culture media within a bioreactor during the production of viral particles, such as AAV viral particles. In certain embodiments, a perfusion system can be used to support the production of high quality AAV viral particles having an unexpectedly high cell density at large-scale. In certain embodiments, a perfusion system can be used to perform a media switch within the bioreactor, such as the replacement of a cell culture media with media supplemented with growth or production boosting factors to increase the quality and quantity of the AAV product.

[0411] It is advantageous to produce large batches of AAV particles in single production campaigns for gene therapy clinical development activities, as the large batches of therapeutic materials ensure clinical study consistency and minimize the therapeutic and statistical variability resulting from multiple smaller manufacturing campaigns. It is advantageous to produce large batches of AAV particles in single production campaigns for commercial product development activities, as the large batches of therapeutic materials minimize the variability resulting from multiple smaller manufacturing campaigns and corresponding complications in quality control and product analysis associated with small-batch production.

### Expansion of Viral Production Cell (VPC) Mixtures

[0412] In certain embodiments, an AAV particle or viral vector of the present disclosure may be produced in a viral production cell (VPC), such as an insect cell. Production cells can be sourced from a Cell Bank (CB) and are often stored in frozen cell banks.

[0413] In certain embodiments, a viral production cell from a Cell Bank is provided in frozen form. The vial of frozen cells is thawed, typically until ice crystal dissipate. In certain embodiments, the frozen cells are thawed at a temperature between 10-50° C., 15-40° C., 20-30° C., 25-50° C., 30-45° C., 35-40° C., or 37-39° C. In certain embodiments, the frozen viral production cells are thawed using a heated water bath.

[0414] In certain embodiments, a thawed CB cell mixture will have a cell density of 1.0×10⁴-1.0×10⁹ cells/mL. In certain embodiments, the thawed CB cell mixture has a cell density of 1.0×10⁴-2.5×10⁴ cells/mL, 2.5×10⁴-5.0×10⁴ cells/mL, 5.0×10⁴-7.5×10⁴ cells/mL, 7.5×10⁴-1.0×10⁵ cells/mL, 1.0×10⁵-2.5×10⁵ cells/mL, 2.5×10⁵-5.0×10⁵ cells/mL, 5.0×10⁵-7.5×10⁵ cells/mL, 7.5×10⁵-1.0×10⁶ cells/mL, 1.0×10⁶-2.5×10⁶ cells/mL, 2.5×10⁶-5.0×10⁶ cells/mL, 5.0×10⁶-7.5×10⁶ cells/mL, 7.5×10⁶-1.0×10⁷ cells/mL, 1.0×10⁷-2.5×10⁷ cells/mL, 2.5×10⁷-5.0×10⁷ cells/mL, 5.0×10⁷-7.5×10⁷ cells/mL, 7.5×10⁷-1.0×10⁸ cells/mL, 1.0×10⁸-2.5×10⁸ cells/mL, 2.5×10⁸-5.0×10⁸ cells/mL, 5.0×10⁸-7.5×10⁸ cells/mL, or 7.5×10⁸-1.0×10⁹ cells/mL.

[0415] In certain embodiments, the volume of the CB cell mixture is expanded. This process is commonly referred to as a Seed Train, Seed Expansion, or CB Cellular Expansion. Cellular/Seed expansion can comprise successive steps of seeding and expanding a cell mixture through multiple expansion steps using successively larger working volumes. In certain embodiments, cellular expansion can comprise one, two, three, four, five, six, seven, or more than seven expansion steps. In certain embodiments, the working volume in the cellular expansion can comprise one or more of the following working volumes or working volume ranges: 5 mL, 10 mL, 20 mL, 5-20 mL, 25 mL, 30 mL, 40 mL, 50 mL, 20-50 mL, 75 mL, 100 mL, 125 mL, 150 mL, 175 mL, 200 mL, 50-200 mL, 250 mL, 300 mL, 400 mL, 500 mL, 750 mL, 1000 mL, 250-1000 mL, 1250 mL, 1500 mL, 1750 mL, 2000 mL, 1000-2000 mL, 2250 mL, 2500 mL, 2750 mL, 3000 mL, 2000-3000 mL, 3500 mL, 4000 mL, 4500 mL, 5000 mL, 3000-5000 mL, 5.5 L, 6.0 L, 7.0 L, 8.0 L, 9.0 L, 10.0 L, and 5.0-10.0 L.

[0416] In certain embodiments, a volume of cells from a first expanded cell mixture can be used to seed a second, separate Seed Train/Seed Expansion (instead of using thawed CB cell mixture). This process is commonly referred to as rolling inoculum. In certain embodiments, rolling inoculum is used in a series of two or more (e.g., two, three, four or five) separate Seed Trains/Seed Expansions.

[0417] In certain embodiments, large-volume cellular expansion can comprise the use of a bioreactor, such as a GE WAVE bioreactor, a GE Xcellerex Bioreactor, a Sartorius Biostat Bioreactor, a ThermoFisher Hyclone Bioreactor, or a Pall Allegro Bioreactor.

[0418] In certain embodiments, the cell density within a working volume is expanded to a target output cell density. In certain embodiments, the output cell density of an expansion step is 1.0×10⁵-5.0×10⁵, 5.0×10⁵-1.0×10⁶, 1.0×10⁶-5.0×10⁶, 5.0×10⁶-1.0×10⁷, 1.0×10⁷-5.0×10⁷, 5.0×10⁷-1.0×10⁸, 5.0×10⁵, 6.0×10⁵, 7.0×10⁵, 8.0×10⁵, 9.0×10⁵, 1.0×10⁶, 2.0×10⁶, 3.0×10⁶, 4.0×10⁶, 5.0×10⁶, 6.0×10⁶, 7.0×10⁶, 8.0×10⁶, 9.0×10⁶, 1.0×10⁷, 2.0×10⁷, 3.0×10⁷, 4.0×10⁷, 5.0×10⁷, 6.0×10⁷, 7.0×10⁷, 8.0×10⁷, or 9.0×10⁷ cells/mL.

[0419] In certain embodiments, the output cell density of a working volume provides a seeding cell density for a larger, successive working volume. In certain embodiments, the seeding cell density of an expansion step is 1.0×10⁵-5.0×10⁵, 5.0×10⁵-1.0×10⁶, 1.0×10⁶-5.0×10⁶, 5.0×10⁶-1.0×10⁷, 1.0×10⁷-5.0×10⁷, 5.0×10⁷-1.0×10⁸, 5.0×10⁵, 6.0×10⁵, 7.0×10⁵, 8.0×10⁵, 9.0×10⁵, 1.0×10⁶, 2.0×10⁶, 3.0×10⁶, 4.0×10⁶, 5.0×10⁶, 6.0×10⁶, 7.0×10⁶, 8.0×10⁶, 9.0×10⁶, 1.0×10⁷, 2.0×10⁷, 3.0×10⁷, 4.0×10⁷, 5.0×10⁷, 6.0×10⁷, 7.0×10⁷, 8.0×10⁷, or 9.0×10⁷ cells/mL.

[0420] In certain embodiments, cellular expansion can last for 1-50 days. Each cellular expansion step or the total cellular expansion can last for 1-10 days, 1-5 days, 1-3 days, 2-3 days, 2-4 days, 2-5 days, 2-6 days, 3-4 days, 3-5 days, 3-6 days, 3-8 days, 4-5 days, 4-6 days, 4-8 days, 5-6 days, or 5-8 days. In certain embodiments, each cellular expansion step or the total cellular expansion can last for 1-100 generations, 1-1000 generations, 100-1000 generation, 100 generations or more, or 1000 generation or more.

[0421] In certain embodiments, infected or transfected production cells can be expanded in the same manner as CB cell mixtures, as set forth in the present disclosure.

### Infection of Viral Production Cells

[0422] In certain embodiments, AAV particles of the present disclosure are produced in a viral production cell (VPC), such as an insect cell, by infecting the VPC with a viral vector which comprises an AAV expression construct and/or a viral vector which comprises an AAV payload construct. In certain embodiments, the VPC is infected with an Expression BEV, which comprises an AAV expression construct and a Payload BEV which comprises an AAV payload construct.

[0423] In certain embodiments, AAV particles are produced by infecting a VPC with a viral vector which comprises both an AAV expression construct and an AAV payload construct. In certain embodiments, the VPC is infected with a single BEV which comprises both an AAV expression construct and an AAV payload construct.

[0424] In certain embodiments, VPCs (such as insect cells) are infected using Infection BIICs in an infection process which comprises the following steps: (i) A collection of VPCs are seeded into a Production Bioreactor; (ii) The seeded VPCs can optionally be expanded to a target working volume and cell density; (iii) Infection BIICs which comprise Expression BEVs and Infection BIICs which comprise Payload BEVs are injected into the Production Bioreactor, resulting in infected viral production cells; and (iv) incubation of the infected viral production cells to produce AAV particles within the viral production cells.

[0425] In certain embodiments, the VPC density at infection is 1.0×10⁵-2.5×10⁵, 2.5×10⁵-5.0×10⁵, 5.0×10⁵-7.5×10⁵, 7.5×10⁵-1.0×10⁶, 1.0×10⁶-5.0×10⁶, 1.0×10⁶-2.0×10⁶, 1.5×10⁶-2.5×10⁶, 2.0×10⁶-3.0×10⁶, 2.5×10⁶-3.5×10⁶, 3.0×10⁶-3.4×10⁶, 3.0×10⁶-4.0×10⁶, 3.5×10⁶-4.5×10⁶, 4.0×10⁶-5.0×10⁶, 4.5×10⁶-5.5×10⁶, 5.0×10⁶-1.0×10⁷, 5.0×10⁶-6.0×10⁶, 5.5×10⁶-6.5×10⁶, 6.0×10⁶-7.0×10⁶, 6.5×10⁶-7.5×10⁶, 7.0×10⁶-8.0×10⁶, 7.5×10⁶-8.5×10⁶, 8.0×10⁶-9.0×10⁶, 8.5×10⁶-9.5×10⁶, 9.0×10⁶-1.0×10⁷, 9.5×10⁶-1.5×10⁷, 1.0×10⁷-5.0×10⁷, or 5.0×10⁷-1.0×10⁸ cells/mL. In certain embodiments, the VPC density at infection is 5.0×10⁵, 6.0×10⁵, 7.0×10⁵, 8.0×10⁵, 9.0×10⁵, 1.0×10⁶, 1.5×10⁶, 2.0×10⁶, 2.5×10⁶, 3.0×10⁶, 3.1×10⁶, 3.2×10⁶, 3.3×10⁶, 3.4×10⁶, 3.5×10⁶, 4.0×10⁶, 4.5×10⁶, 5.0×10⁶, 5.5×10⁶, 6.0×10⁶, 6.5×10⁶, 7.0×10⁶, 7.5×10⁶, 8.0×10⁶, 8.5×10⁶, 9.0×10⁶, 9.5×10⁶, 1.0×10⁷, 1.5×10⁷, 2.0×10⁷, 2.5×10⁷, 3.0×10⁷, 4.0×10⁷, 5.0×10⁷, 6.0×10⁷, 7.0×10⁷, 8.0×10⁷, or 9.0×10⁷ cells/mL. In certain embodiments, the VPC density at infection is 2.0-3.5×10⁶ cells/mL. In certain embodiments, the VPC density at infection is 3.5-5.0×10⁶ cells/mL. In certain embodiments, the VPC density at infection is 5.0-7.5×10⁶ cells/mL. In certain embodiments, the VPC density at infection is 5.0-10.0×10⁶ cells/mL.

[0426] In certain embodiments, Infection BIICs are combined with the VPCs in target ratios of VPC-to-BIIC. In certain embodiments, the VPC-to-BIIC infection ratio (volume to volume) is 1.0×10³-5.0×10³, 5.0×10³-1.0×10⁴, 1.0×10⁴-5.0×10⁴, 5.0×10⁴-1.0×10⁵, 1.0×10⁵-5.0×10⁵, 5.0×10⁵-1.0×10⁶, 1.0×10³, 2.0×10³, 3.0×10³, 4.0×10³, 5.0×10³, 6.0×10³, 7.0×10³, 8.0×10³, 9.0×10³, 1.0×10⁴, 2.0×10⁴, 3.0×10⁴, 4.0×10⁴, 5.0×10⁴, 6.0×10⁴, 7.0×10⁴, 8.0×10⁴, or 9.0×10⁴, 1.0×10⁵, 2.0×10⁵, 3.0×10⁵, 4.0×10⁵, 5.0×10⁵, 6.0×10⁵, 7.0×10⁵, 8.0×10⁵, or 9.0×10⁵ (VPC volume to BIIC volume). In certain embodiments, the VPC-to-BIIC infection ratio (cell to cell) is 1.0×10³-5.0×10³, 5.0×10³-1.0×10⁴, 1.0×10⁴-5.0×10⁴, 5.0×10⁴-1.0×10⁵, 1.0×10⁵-5.0×10⁵, 5.0×10⁵-1.0×10⁶, 1.0×10³, 2.0×10³, 3.0×10³, 4.0×10³, 5.0×10³, 6.0×10³, 7.0×10³, 8.0×10³, 9.0×10³, 1.0×10⁴, 2.0×10⁴, 3.0×10⁴, 4.0×10⁴, 5.0×10⁴, 6.0×10⁴, 7.0×10⁴, 8.0×10⁴, or 9.0×10⁴, 1.0×10⁵, 2.0×10⁵, 3.0×10⁵, 4.0×10⁵, 5.0×10⁵, 6.0×10⁵, 7.0×10⁵, 8.0×10⁵, or 9.0×10⁵ (VPC cells to BIIC cells).

[0427] In certain embodiments, Infection BIICs which comprise Expression BEVs are combined with the VPCs in target ratios of VPC-to-expressionBIIC. In certain embodiments, the VPC-to-expressionBIIC infection ratio (volume to volume) is 1.0×10³-5.0×10³, 5.0×10³-1.0×10⁴, 1.0×10⁴-5.0×10⁴, 5.0×10⁴-1.0×10⁵, 1.0×10⁵-5.0×10⁵, 5.0×10⁵-1.0×10⁶, 1.0×10³, 2.0×10³, 3.0×10³, 4.0×10³, 5.0×10³, 6.0×10³, 7.0×10³, 8.0×10³, 9.0×10³, 1.0×10⁴, 2.0×10⁴, 3.0×10⁴, 4.0×10⁴, 5.0×10⁴, 6.0×10⁴, 7.0×10⁴, 8.0×10⁴, or 9.0×10⁴, 1.0×10⁵, 2.0×10⁵, 3.0×10⁵, 4.0×10⁵, 5.0×10⁵, 6.0×10⁵, 7.0×10⁵, 8.0×10⁵, or 9.0×10⁵ (VPC volume to BIIC volume). In certain embodiments, the VPC-to-expressionBIIC infection ratio (cell to cell) is 1.0×10³-5.0×10³, 5.0×10³-1.0×10⁴, 1.0×10⁴-5.0×10⁴, 5.0×10⁴-1.0×10⁵, 1.0×10⁵-5.0×10⁵, 5.0×10⁵-1.0×10⁶, 1.0×10³, 2.0×10³, 3.0×10³, 4.0×10³, 5.0×10³, 6.0×10³, 7.0×10³, 8.0×10³, 9.0×10³, 1.0×10⁴, 2.0×10⁴, 3.0×10⁴, 4.0×10⁴, 5.0×10⁴, 6.0×10⁴, 7.0×10⁴, 8.0×10⁴, or 9.0×10⁴, 1.0×10⁵, 2.0×10⁵, 3.0×10⁵, 4.0×10⁵, 5.0×10⁵, 6.0×10⁵, 7.0×10⁵, 8.0×10⁵, or 9.0×10⁵ (VPC cells to BIIC cells).

[0428] In certain embodiments, Infection BIICs which comprise Payload BEVs are combined with the VPCs in target ratios of VPC-to-payloadBIIC. In certain embodiments, the VPC-to-payloadBIIC infection ratio (volume to volume) is 1.0×10³-5.0×10³, 5.0×10³-1.0×10⁴, 1.0×10⁴-5.0×10⁴, 5.0×10⁴-1.0×10⁵, 1.0×10⁵-5.0×10⁵, 5.0×10⁵-1.0×10⁶, 1.0×10³, 2.0×10³, 3.0×10³, 4.0×10³, 5.0×10³, 6.0×10³, 7.0×10³, 8.0×10³, 9.0×10³, 1.0×10⁴, 2.0×10⁴, 3.0×10⁴, 4.0×10⁴, 5.0×10⁴, 6.0×10⁴, 7.0×10⁴, 8.0×10⁴, or 9.0×10⁴, 1.0×10⁵, 2.0×10⁵, 3.0×10⁵, 4.0×10⁵, 5.0×10⁵, 6.0×10⁵, 7.0×10⁵, 8.0×10⁵, or 9.0×10⁵ (VPC volume to BIIC volume). In certain embodiments, the VPC-to-payloadBIIC infection ratio (cell to cell) is 1.0×10³-5.0×10³, 5.0×10³-1.0×10⁴, 1.0×10⁴-5.0×10⁴, 5.0×10⁴-1.0×10⁵, 1.0×10⁵-5.0×10⁵, 5.0×10⁵-1.0×10⁶, 1.0×10³, 2.0×10³, 3.0×10³, 4.0×10³, 5.0×10³, 6.0×10³, 7.0×10³, 8.0×10³, 9.0×10³, 1.0×10⁴, 2.0×10⁴, 3.0×10⁴, 4.0×10⁴, 5.0×10⁴, 6.0×10⁴, 7.0×10⁴, 8.0×10⁴, or 9.0×10⁴, 1.0×10⁵, 2.0×10⁵, 3.0×10⁵, 4.0×10⁵, 5.0×10⁵, 6.0×10⁵, 7.0×10⁵, 8.0×10⁵, or 9.0×10⁵ (VPC cells to BIIC cells).

[0429] In certain embodiments, Infection BIICs which comprise Expression BEVs and Infection BIICs which comprise Payload BEVs are combined with the VPCs in target expressionBIIC-to-payloadBIIC ratios. In certain embodiments, the ratio of expressionBIICs to payloadBIICs is 10:1, 9:1, 8:1, 7:1, 6:1, 5:1, 4.5:1, 4:1, 3.5:1, 3:1, 2.5:1, 2:1, 1.5:1, 1:1, 1:1.5, 1:2, 1:2.5, 1:3, 1:3.5, 1:4, 1:4.5, 1:5, 1:5.5, 1:6, 1:6.5, 1:7, 1:7.5, 1:8, 1:9, or 1:10. In certain embodiments, the ratio of expressionBIICs to payloadBIICs is between 6.5-7.5:1, 6-7:1, 5.5-6.5:1, 5-6:1, 4.5-5.5:1, 4-5:1, 3.5-4.5:1, 3-4:1, 2.5-3.5:1, 2-3:1, 1.5-2.5:1, 1-2:1, 1-1.5:1, 1:1-1.5, 1:1-2, 1:1.5-2.5, 1:2-3, 1:2.5-3.5, 1:3-4, 1:3.5-4.5, 1:4-5, 1:4.5-5.5, 1:5-6, 1:5.5-6.5, 1:6-7, or 1:6.5-7.5.

[0430] FIG. 4A, FIG. 4B, FIG. 5A, FIG. 5B, FIG. 6A, and FIG. 6B show that a VPC density at transfection/infection of between 3.0-3.4×10⁶ cells/mL (particularly 3.2×10⁶ cells/mL) combined with a VPC-to-expressionBIIC ratio of 250K-350K:1 (v/v), e.g., about 300K:1 (v/v), and a payloadBIIC-to-expressionBIIC ratio of 2.5-3.5:1 (v/v), e.g., about 3:1 (v/v) (e.g., a VPC-to-payloadBIIC ratio of about 100K:1 (v/v)) provides favorable AAV titer (vg/mL) and Capsid Full %.

[0431] In certain embodiments, infected Viral Production Cells are incubated under a certain Dissolved Oxygen (DO) Content (DO %). In certain embodiments, infected Viral Production Cells are incubated under a DO % between 10%-50%, 20%-40%, 10%-20%, 15%-25%, 20%-30%, 25%-35%, 30%-40%, 35%-45%, 40%-50%, 10%-15%, 15%-20%, 20%-25%, 25%-30%, 30%-35%, 35%-40%, 40%-45%, or 45%-50%. In certain embodiments, infected Viral Production Cells are incubated under a DO % of about 10%, about 15%, about 20%, about 25%, about 30%, about 35%, about 40%, about 45%, about 50%. In certain embodiments, infected Viral Production Cells are incubated under a DO % between 20%-30% or about 25%. In certain embodiments, infected Viral Production Cells are incubated under a DO % between 25%-35% or about 30%. In certain embodiments, infected Viral Production Cells are incubated under a DO % between 30%-40% or about 35%. In certain embodiments, infected Viral Production Cells are incubated under a DO % between 35%-45% or about 40%.

### Cell Lysis

[0432] Cells of the present disclosure, comprising, but not limited to viral production cells, may be subjected to cell lysis according to any methods known in the art. Cell lysis may be carried out to obtain one or more agents (e.g., viral particles) present within any cells of the disclosure. In certain embodiments, a bulk harvest of AAV particles and viral production cells is subjected to cell lysis according to the present disclosure.

[0433] In certain embodiments, cell lysis may be carried out according to any of the methods or systems presented in U.S. Pat. Nos. 7,326,555, 7,579,181, 7,048,920, 6,410,300, 6,436,394, 7,732,129, 7,510,875, 7,445,930, 6,726,907, 6,194,191, 7,125,706, 6,995,006, 6,676,935, 7,968,333, 5,756,283, 6,258,595, 6,261,551, 6,270,996, 6,281,010, 6,365,394, 6,475,769, 6,482,634, 6,485,966, 6,943,019, 6,953,690, 7,022,519, 7,238,526, 7,291,498 and 7,491,508 or International Publication Nos. WO1996039530, WO1998010088, WO1999014354, WO1999015685, WO1999047691, WO2000055342, WO2000075353 and WO2001023597, the contents of each of which are herein incorporated by reference in their entirety.

[0434] Cell lysis methods and systems may be chemical or mechanical. Chemical cell lysis typically comprises contacting one or more cells with one or more chemical lysis agent under chemical lysis conditions. Mechanical lysis typically comprises subjecting one or more cells to cell lysis carried out by mechanical force. Lysis can also be completed by allowing the cells to degrade after reaching ˜0% viability.

[0435] In certain embodiments, chemical lysis may be used to lyse cells. As used herein, the term “chemical lysis agent” refers to any agent that may aid in the disruption of a cell. In certain embodiments, lysis agents are introduced in solutions, termed lysis solutions or lysis buffers. As used herein, the term “chemical lysis solution” refers to a solution (typically aqueous) comprising one or more lysis agent. In addition to lysis agents, lysis solutions may comprise one or more buffering agents, solubilizing agents, surfactants, preservatives, cryoprotectants, enzymes, enzyme inhibitors and/or chelators. Lysis buffers are lysis solutions comprising one or more buffering agent. Additional components of lysis solutions may comprise one or more solubilizing agent. As used herein, the term “solubilizing agent” refers to a compound that enhances the solubility of one or more components of a solution and/or the solubility of one or more entities to which solutions are applied. In certain embodiments, solubilizing agents enhance protein solubility. In certain embodiments, solubilizing agents are selected based on their ability to enhance protein solubility while maintaining protein conformation and/or activity.

[0436] Exemplary lysis agents may comprise any of those described in U.S. Pat. Nos. 8,685,734, 7,901,921, 7,732,129, 7,223,585, 7,125,706, 8,236,495, 8,110,351, 7,419,956, 7,300,797, 6,699,706 and 6,143,567, the contents of each of which are herein incorporated by reference in their entirety. In certain embodiments, lysis agents may be selected from lysis salts, amphoteric agents, cationic agents, ionic detergents and non-ionic detergents. Lysis salts may comprise, but are not limited to, sodium chloride (NaCl) and potassium chloride (KCl.) Further lysis salts may comprise any of those described in U.S. Pat. Nos. 8,614,101, 7,326,555, 7,579,181, 7,048,920, 6,410,300, 6,436,394, 7,732,129, 7,510,875, 7,445,930, 6,726,907, 6,194,191, 7,125,706, 6,995,006, 6,676,935 and 7,968,333, the contents of each of which are herein incorporated by reference in their entirety.

[0437] In certain embodiments, the cell lysate solution comprises a stabilizing additive. In certain embodiments, the stabilizing additive can comprise trehalose, glycine betaine, mannitol, potassium citrate, CuCl₂, proline, xylitol, NDSB 201, CTAB and K₂PO₄. In certain embodiments, the stabilizing additive can comprise amino acids such as arginine, or acidified amino acid mixtures such as arginine HCl. In certain embodiments, the stabilizing additive can comprise 0.1 M arginine or arginine HCl. In certain embodiments, the stabilizing additive can comprise 0.2 M arginine or arginine HCl. In certain embodiments, the stabilizing additive can comprise 0.25 M arginine or arginine HCl. In certain embodiments, the stabilizing additive can comprise 0.3 M arginine or arginine HCl. In certain embodiments, the stabilizing additive can comprise 0.4 M arginine or arginine HCl. In certain embodiments, the stabilizing additive can comprise 0.5 M arginine or arginine HCl. In certain embodiments, the stabilizing additive can comprise 0.6 M arginine or arginine HCl. In certain embodiments, the stabilizing additive can comprise 0.7 M arginine or arginine HCl. In certain embodiments, the stabilizing additive can comprise 0.8 M arginine or arginine HCl. In certain embodiments, the stabilizing additive can comprise 0.9 M arginine or arginine HCl. In certain embodiments, the stabilizing additive can comprise 1.0 M arginine or arginine HCl.

[0438] Concentrations of salts may be increased or decreased to obtain an effective concentration for the rupture of cell membranes. Amphoteric agents, as referred to herein, are compounds capable of reacting as an acid or a base. Amphoteric agents may comprise, but are not limited to lysophosphatidylcholine, 3-((3-Cholamidopropyl) dimethylammonium)-1-propanesulfonate (CHAPS), ZWITTERGENT® and the like. Cationic agents may comprise, but are not limited to, cetyltrimethylammonium bromide (C (16) TAB) and Benzalkonium chloride. Lysis agents comprising detergents may comprise ionic detergents or non-ionic detergents.

[0439] Detergents may function to break apart or dissolve cell structures comprising, but not limited to cell membranes, cell walls, lipids, carbohydrates, lipoproteins and glycoproteins. Exemplary ionic detergents comprise any of those taught in U.S. Pat. Nos. 7,625,570 and 6,593,123 or US Publication No. US2014/0087361, the contents of each of which are herein incorporated by reference in their entirety. In certain embodiments, the lysis solution comprises one or more ionic detergents. Example of ionic detergents for use in a lysis solution comprise, but are not limited to, sodium dodecyl sulfate (SDS), cholate and deoxycholate. In certain embodiments, ionic detergents may be comprised in lysis solutions as a solubilizing agent. In certain embodiments, the lysis solution comprises one or more nonionic detergents. Non-ionic detergents for use in a lysis solution may comprise, but are not limited to, octylglucoside, digitonin, lubrol, C12E8, TWEEN®-20, TWEEN®-80, Triton X-100, Triton X-114, Brij-35, Brij-58, and Noniodet P-40. Non-ionic detergents are typically weaker lysis agents but may be comprised as solubilizing agents for solubilizing cellular and/or viral proteins. In certain embodiments, the lysis solution comprises one or more zwitterionic detergents. Zwitterionic detergents for use in a lysis solution may comprise, but are not limited to: Lauryl dimethylamine N-oxide (LDAO); N,N-Dimethyl-N-dodecylglycine betaine (Empigen® BB); 3-(N,N-Dimethylmyristylammonio) propanesulfonate (Zwittergent® 3-10); n-Dodecyl-N,N-dimethyl-3-ammonio-1-propanesulfonate (Zwittergent® 3-12); n-Tetradecyl-N,N-dimethyl-3-ammonio-1-propanesulfonate (Zwittergent® 3-14); 3-(N,N-Dimethyl palmitylammonio) propanesulfonate (Zwittergent® 3-16); 3-((3-cholamidopropyl) dimethylammonio)-1-propanesulfonate (CHAPS); and 3-([3-Cholamidopropyl] dimethylammonio)-2-hydroxy-1-propanesulfonate (CHAPSO).

[0440] In certain embodiments, the lysis solution comprises Triton X-100 (octyl phenol ethoxylate), such as 0.5% w/v of Triton X-100. In certain embodiments, the lysis solution comprises Lauryldimethylamine N-oxide (LDAO), such as 0.184% w/v (4×CMC) of LDAO. In certain embodiments, the lysis solution comprises a seed oil surfactant such as Ecosurf™ SA-9. In certain embodiments, the lysis solution comprises N,N-Dimethyl-N-dodecylglycine betaine (Empigen® BB). In certain embodiments, the lysis solution comprises a Zwittergent® detergent, such as Zwittergent® 3-12 (n-Dodecyl-N,N-dimethyl-3-ammonio-1-propanesulfonate), Zwittergent® 3-14 (n-Tetradecyl-N,N-dimethyl-3-ammonio-1-propanesulfonate), or Zwittergent® 3-16 (3-(N,N-Dimethyl palmitylammonio)propanesulfonate).

[0441] Further lysis agents may comprise enzymes and urea. In certain embodiments, one or more lysis agents may be combined in a lysis solution in order to enhance one or more of cell lysis and protein solubility. In certain embodiments, enzyme inhibitors may be comprised in lysis solutions in order to prevent proteolysis that may be triggered by cell membrane disruption.

[0442] In certain embodiments, the lysis solution comprises between 0.1-1.0% w/v, between 0.2-0.8% w/v, between 0.3-0.7% w/v, between 0.4-0.6% w/v, or about 0.5% w/v of a cell lysis agent (e.g., detergent). In certain embodiments, the lysis solution comprises between 0.3-0.35% w/v, between 0.35-0.4% w/v, between 0.4-0.45% w/v, between 0.45-0.5% w/v, between 0.5-0.55% w/v, between 0.55-0.6% w/v, between 0.6-0.65% w/v, or between 0.65-0.7% w/v of a cell lysis agent (e.g., detergent).

[0443] In certain embodiments, cell lysates generated from adherent cell cultures may be treated with one more nuclease, such as Benzonase nuclease (Grade I, 99% pure) or c-LEcta Denarase nuclease (formerly Sartorius Denarase). In certain embodiments, nuclease is added to lower the viscosity of the lysates caused by liberated DNA.

[0444] In certain embodiments, chemical lysis uses a single chemical lysis mixture. In certain embodiments, chemical lysis uses several lysis agents added in series to provide a final chemical lysis mixture.

[0445] In certain embodiments, a chemical lysis mixture comprises an acidified amino acid mixture (such as arginine HCl), a non-ionic detergent (such as Triton X-100), and a nuclease (such as Benzonase nuclease). In certain embodiments, the chemical lysis mixture can comprise an acid or base to provide a target lysis pH.

[0446] In certain embodiments, the lysis solution comprises 0.5% w/v Triton X-100 (octyl phenol ethoxylate) and 200 mM arginine hydrochloride. In certain embodiments, the lysis solution comprises 0.5% w/v Triton X-100 (octyl phenol ethoxylate) and 200 mM arginine hydrochloride, and lacks detectable nuclease. In certain embodiments, the lysis solution consists of 0.5% w/v Triton X-100 (octyl phenol ethoxylate) and 200 mM arginine hydrochloride.

[0447] In certain embodiments, chemical lysis is conducted under chemical lysis conditions. As used herein, the term “chemical lysis conditions” refers to any combination of environmental conditions (e.g., temperature, pressure, pH, etc) in which targets cells can be lysed by a chemical lysis agent.

[0448] In certain embodiments, the lysis pH is between 3.0-3.5, 3.5-4.0, 4.0-4.5, 4.5-5.0, 5.0-5.5, 5.5-6.0, 6.0-6.5, 6.5-7.0, 7.0-7.5, or 7.5-8.0. In certain embodiments, the lysis pH is between 6.0-7.0, 6.5-7.0, 6.5-7.5, or 7.0-7.5.

[0449] In certain embodiments, the lysis temperature is between 15-35° C., between 20-30° C., between 25-39° C., between 20-21° C., between 20-22° C., between 21-22° C., between 21-23° C., between 22-23° C., between 22-24° C., between 23-24° C., between 23-25° C., between 24-25° C., between 24-26° C., between 25-26° C., between 25-27° C., between 26-27° C., between 26-28° C., between 27-28° C., between 27-29° C., between 28-29° C., between 28-30° C., between 29-30° C., between 29-31° C., between 30-31° C., between 30-32° C., between 31-32° C., or between 31-33° C.

[0450] In certain embodiments, the lysis solution comprises 0.5% w/v Triton X-100 (octyl phenol ethoxylate) and 200 mM arginine hydrochloride, and lysis conditions comprise a duration of at least 4 hours (e.g., 4-6 hours, e.g., 4 hours) at 26° C.-28° C. (e.g., 27° C.). In certain embodiments, the lysis solution comprises 0.5% w/v Triton X-100 (octyl phenol ethoxylate) and 200 mM arginine hydrochloride, and lacks detectable nuclease, and lysis conditions comprise a duration of at least 4 hours (e.g., 4-6 hours, e.g., 4 hours) at 26° C.-28° C. (e.g., 27° C.). In certain embodiments, the lysis solution consists of 0.5% w/v Triton X-100 (octyl phenol ethoxylate) and 200 mM arginine hydrochloride, and lysis conditions comprise a duration of at least 4 hours (e.g., 4-6 hours, e.g., 4 hours) at 26° C.-28° C. (e.g., 27° C.).

[0451] In certain embodiments, mechanical cell lysis is carried out. Mechanical cell lysis methods may comprise the use of one or more lysis condition and/or one or more lysis force. As used herein, the term “lysis condition” refers to a state or circumstance that promotes cellular disruption. Lysis conditions may comprise certain temperatures, pressures, osmotic purity, salinity and the like. In certain embodiments, lysis conditions comprise increased or decreased temperatures. According to certain embodiments, lysis conditions comprise changes in temperature to promote cellular disruption. Cell lysis carried out according to such embodiments may comprise freeze-thaw lysis. As used herein, the term “freeze-thaw lysis” refers to cellular lysis in which a cell solution is subjected to one or more freeze-thaw cycle. According to freeze-thaw lysis methods, cells in solution are frozen to induce a mechanical disruption of cellular membranes caused by the formation and expansion of ice crystals. Cell solutions used according freeze-thaw lysis methods, may further comprise one or more lysis agents, solubilizing agents, buffering agents, cryoprotectants, surfactants, preservatives, enzymes, enzyme inhibitors and/or chelators. Once cell solutions subjected to freezing are thawed, such components may enhance the recovery of desired cellular products. In certain embodiments, one or more cryoprotectants are comprised in cell solutions undergoing freeze-thaw lysis. As used herein, the term “cryoprotectant” refers to an agent used to protect one or more substance from damage due to freezing. Cryoprotectants may comprise any of those taught in US Publication No. US2013/0323302 or U.S. Pat. Nos. 6,503,888, 6,180,613, 7,888,096, 7,091,030, the contents of each of which are herein incorporated by reference in their entirety. In certain embodiments, cryoprotectants may comprise, but are not limited to dimethyl sulfoxide, 1,2-propanediol, 2,3-butanediol, formamide, glycerol, ethylene glycol, 1,3-propanediol and n-dimethyl formamide, polyvinylpyrrolidone, hydroxyethyl starch, agarose, dextrans, inositol, glucose, hydroxyethylstarch, lactose, sorbitol, methyl glucose, sucrose and urea. In certain embodiments, freeze-thaw lysis may be carried out according to any of the methods described in U.S. Pat. No. 7,704,721, the contents of which are herein incorporated by reference in their entirety.

[0452] As used herein, the term “lysis force” refers to a physical activity used to disrupt a cell. Lysis forces may comprise, but are not limited to mechanical forces, sonic forces, gravitational forces, optical forces, electrical forces and the like. Cell lysis carried out by mechanical force is referred to herein as “mechanical lysis.” Mechanical forces that may be used according to mechanical lysis may comprise high shear fluid forces. According to such methods of mechanical lysis, a microfluidizer may be used. Microfluidizers typically comprise an inlet reservoir where cell solutions may be applied. Cell solutions may then be pumped into an interaction chamber via a pump (e.g., high-pressure pump) at high speed and/or pressure to produce shear fluid forces. Resulting lysates may then be collected in one or more output reservoir. Pump speed and/or pressure may be adjusted to modulate cell lysis and enhance recovery of products (e.g., viral particles.) Other mechanical lysis methods may comprise physical disruption of cells by scraping.

[0453] Cell lysis methods may be selected based on the cell culture format of cells to be lysed. For example, with adherent cell cultures, some chemical and mechanical lysis methods may be used. Such mechanical lysis methods may comprise freeze-thaw lysis or scraping. In another example, chemical lysis of adherent cell cultures may be carried out through incubation with lysis solutions comprising surfactant, such as Triton-X-100.

[0454] In certain embodiments, a method for harvesting AAV particles without lysis may be used for efficient and scalable AAV particle production. In a non-limiting example, AAV particles may be produced by culturing an AAV particle lacking a heparin binding site, thereby allowing the AAV particle to pass into the supernatant, in a cell culture, collecting supernatant from the culture; and isolating the AAV particle from the supernatant, as described in US Patent Application 20090275107, the contents of which are incorporated herein by reference in their entirety.

### Clarification and Purification: General

[0455] Cell lysates comprising viral particles may be subjected to clarification and purification. Clarification generally refers to the initial steps taken in the purification of viral particles from cell lysates and serves to prepare lysates for further purification by removing larger, insoluble debris from a bulk lysis harvest. Viral production can comprise clarification steps at any point in the viral production process. Clarification steps may comprise, but are not limited to, centrifugation and filtration. During clarification, centrifugation may be carried out at low speeds to remove larger debris only. Similarly, filtration may be carried out using filters with larger pore sizes so that only larger debris is removed.

[0456] Purification generally refers to the final steps taken in the purification and concentration of viral particles from cell lysates by removing smaller debris from a clarified lysis harvest in preparing a final Pooled Drug Substance. Viral production can comprise purification steps at any point in the viral production process. Purification steps may comprise, but are not limited to, filtration and chromatography. Filtration may be carried out using filters with smaller pore sizes to remove smaller debris from the product or with larger pore sizes to retain larger debris from the product. Filtration may be used to alter the concentration and/or contents of a viral production pool or stream. Chromatography may be carried out to selectively separate target particles from a pool of impurities.

[0457] Large-scale production of high-concentration AAV formulations is complicated by the tendency for high concentrations of AAV particles to aggregate or agglomerate. Small scale clarification and concentration systems, such as dialysis cassettes or spin centrifugation, are generally not sufficiently scalable for large-scale production. The present disclosure provides embodiments of a clarification, purification and concentration system for processing large volumes of high-concentration AAV production formulations. In certain embodiments, the large-volume clarification system comprises one or more of the following processing steps: Depth Filtration, Microfiltration (e.g., 0.2 μm Filtration), Affinity Chromatography, Ion Exchange Chromatography such as anion exchange chromatography (AEX) or cation exchange chromatography (CEX), a tangential flow filtration system (TFF), Nanofiltration (e.g., Virus Retentive Filtration (VRF)), Final Filtration (FF), and Fill Filtration.

[0458] Objectives of viral clarification and purification comprise high throughput processing of cell lysates and to optimize ultimate viral recovery. Advantages of comprising clarification and purification steps of the present disclosure comprise scalability for processing of larger volumes of lysate. In certain embodiments, clarification and purification may be carried out according to any of the methods or systems presented in U.S. Pat. Nos. 8,524,446, 5,756,283, 6,258,595, 6,261,551, 6,270,996, 6,281,010, 6,365,394, 6,475,769, 6,482,634, 6,485,966, 6,943,019, 6,953,690, 7,022,519, 7,238,526, 7,291,498, 7,491,508, US Publication Nos. US2013/0045186, US2011/0263027, US2011/0151434, US2003/0138772, and International Publication Nos. WO2002012455, WO1996039530, WO1998010088, WO1999014354, WO1999015685, WO1999047691, WO2000055342, WO2000075353 and WO2001023597, the contents of each of which are herein incorporated by reference in their entirety.

[0459] In certain embodiments, the compositions comprising at least one AAV particle may be isolated or purified using the methods or systems described in U.S. Pat. Nos. 6,146,874, 6,660,514, 8,283,151 or U.S. Pat. No. 8,524,446, the contents of which are herein incorporated by reference in their entirety.

### Clarification and Purification: Centrifugation

[0460] According to certain embodiments, cell lysates may be clarified by one or more centrifugation steps. Centrifugation may be used to pellet insoluble particles in the lysate. During clarification, centrifugation strength (which can be expressed in terms of gravitational units (g), which represents multiples of standard gravitational force) may be lower than in subsequent purification steps. In certain embodiments, centrifugation may be carried out on cell lysates at a gravitation force from about 200 g to about 800 g, from about 500 g to about 1500 g, from about 1000 g to about 5000 g, from about 1200 g to about 10000 g or from about 8000 g to about 15000 g. In certain embodiments, cell lysate centrifugation is carried out at 8000 g for 15 minutes. In certain embodiments, density gradient centrifugation may be carried out in order to partition particulates in the cell lysate by sedimentation rate. Gradients used according to methods or systems of the present disclosure may comprise, but are not limited to, cesium chloride gradients and iodixanol step gradients. In certain embodiments, centrifugation uses a decanter centrifuge system. In certain embodiments, centrifugation uses a disc-stack centrifuge system. In certain embodiments, centrifugation comprises ultracentrifugation, such two-cycle CsCl gradient ultracentrifugation or iodixanol discontinuous density gradient ultracentrifugation.

### Clarification and Purification: Filtration

[0461] In certain embodiments, one or more microfiltration, nanofiltration and/or ultrafiltration steps may be used during clarification, purification and/or sterilization. The one or more microfiltration, nanofiltration or ultrafiltration steps can comprise the use of a filtration system such as EMD Millipore Express SHC XL10 0.5/0.2 μm filter, EMD Millipore Express SHCXL6000 0.5/0.2 μm filter, EMD Millipore Express SHCXL150 filter, EMD Millipore Millipak Gamma Gold 0.22 μm filter (dual-in-line sterilizing grade filters), a Pall Supor EKV, 0.2 μm sterilizing-grade filter, Asahi Planova 35N, Asahi Planova 20N, Asahi Planova 75N, Asahi Planova BioEx, Millipore Viresolve NFR or a Sartorius Sartopore 2XLG, 0.8/0.2 μm.

[0462] In certain embodiments, one or more microfiltration steps may be used during clarification, purification and/or sterilization. Microfiltration utilizes microfiltration membranes with pore sizes typically between 0.1 μm and 10 μm. Microfiltration is generally used for general clarification, sterilization, and removal of microparticulates. In certain embodiments, microfiltration is used to remove aggregated clumps of viral particles. In certain embodiments, a production process or system of the present disclosure comprises at least one microfiltration step. The one or more microfiltration steps can comprise a Depth Filtration step with a Depth Filtration system, such as EMD Millipore Millistak⁺ POD filter (DOHC media series), Millipore MCOSP23CL3 filter (COSP media series), or Sartorius Sartopore filter series. Microfiltration systems of the present disclosure can be pre-rinsed, packed, equilibrated, flushed, processed, eluted, washed or cleaned with formulations known to those in the art, comprising AAV pharmaceutical, processing and storage formulations of the present disclosure. In certain embodiments, clarification comprises use of a C0SP media series filter. In some embodiments, the C0SP media series filter is effective to reduce or prevent 0.2 micron filter clogging.

[0463] In certain embodiments, one or more ultrafiltration steps may be used during clarification and purification. The ultrafiltration steps can be used for concentrating, formulating, desalting or dehydrating either processing and/or formulation solutions of the present disclosure. Ultrafiltration utilizes ultrafiltration membranes, with pore sizes typically between 0.001 and 0.1 μm. Ultrafiltration membranes can also be defined by their molecular weight cutoff (MWCO) and can have a range from 1 kD to 500 kD. Ultrafiltration is generally used for concentrating and formulating dissolved biomolecules such as proteins, peptides, plasmids, viral particles, nucleic acids, and carbohydrates. Ultrafiltration systems of the present disclosure can be pre-rinsed, packed, equilibrated, flushed, processed, eluted, washed or cleaned with formulations known to those in the art, comprising AAV pharmaceutical, processing and storage formulations of the present disclosure.

[0464] In certain embodiments, one or more nanofiltration steps may be used during clarification and purification. Nanofiltration utilizes nanofiltration membranes, with pore sizes typically less than 100 nm. Nanofiltration is generally used for removal of unwanted endogenous viral impurities (e.g., baculovirus). In certain embodiments, nanofiltration can comprise viral removal filtration (VRF). VRF filters can have a filtration size typically between 15 nm and 100 nm. Examples of VRF filters comprise (but are not limited to): Planova 15N, Planova 20N, and Planova 35N (Asahi-Kasei Corp, Tokyo, Japan); and Viresolve NFP and Viresolve NFR (Millipore Corp, Billerica, Mass., USA). Nanofiltration systems of the present disclosure can be pre-rinsed, packed, equilibrated, flushed, processed, eluted, washed or cleaned with formulations known to those in the art, comprising AAV pharmaceutical, processing and storage formulations of the present disclosure. In certain embodiments, nanofiltration is used to remove aggregated clumps of viral particles.

[0465] In certain embodiments, one or more tangential flow filtration (TFF) (also known as cross-flow filtration) steps may be used during clarification and purification. Tangential flow filtration is a form of membrane filtration in which a feed stream (which comprises the target agent/particle to be clarified and concentrated) flows from a feed tank into a filtration module or cartridge. Within the TFF filtration module, the feed stream passes parallel to a membrane surface, such that one portion of the stream passes through the membrane (permeate/filtrate) while the remainder of the stream (retentate) is recirculated back through the filtration system and into the feed tank.

[0466] In certain embodiments, the TFF filtration module can be a flat plate module (stacked planar cassette), a spiral wound module (spiral-wound membrane layers), or a hollow fiber module (bundle of membrane tubes). Examples of TFF systems for use in the present disclosure comprise, but are not limited to: Spectrum mPES Hollow Fiber TFF system (0.5 mm fiber ID, 100 kDA MWCO) or Millipore Ultracel PLCTK system with Pellicon-3 cassette (0.57 m², 30 kDA MWCO).

[0467] New buffer materials can be added to the TFF feed tank as the feed stream is circulated through the TFF filtration system. In certain embodiments, buffer materials can be fully replenished as the flow stream circulates through the TFF filtration system. In this embodiment, buffer material is added to the stream in equal amounts to the buffer material lost in the permeate, resulting in a constant concentration. In certain embodiments, buffer materials can be reduced as the flow stream circulates through the filtration system. In this embodiment, a reduced amount of buffer material is added to the stream relative to the buffer material lost in the permeate, resulting in an increased concentration. In certain embodiments, buffer materials can be replaced as the flow stream circulates through the filtration system. In this embodiment, the buffer added to stream is different from buffer materials lost in the permeate, resulting in an eventual replacement of buffer material in the stream. TFF systems of the present disclosure can be pre-rinsed, packed, equilibrated, flushed, processed, eluted, washed or cleaned with formulations known to those in the art, comprising AAV pharmaceutical, processing and storage formulations of the present disclosure.

[0468] In certain embodiments, a TFF load pool can be spiked with an excipient or diluent prior to filtration. In certain embodiments, a TFF load pool is spiked with a high-salt mixture (such as sodium chloride or potassium chloride) prior to filtration. In certain embodiments, a TFF load pool is spiked with a high-sugar mixture (such as 50% w/v sucrose) prior to filtration.

[0469] The effectiveness of TFF processing can depend on several factors, comprising (but not limited to): shear stress from flow design, cross-flow rate, filtrate flow control, transmembrane pressure (TMP), membrane conditioning, membrane composition (e.g., hollow fiber construction) and design (e.g., surface area), system flow design, reservoir design, and mixing strategy. In certain embodiment, the filtration membrane can be exposed to pre-TFF membrane conditioning.

[0470] In certain embodiments, TFF processing can comprise one or more microfiltration stages. In certain embodiments, TFF processing can comprise one or more ultrafiltration stages. In certain embodiments, TFF processing can comprise one or more nanofiltration stages.

[0471] In certain embodiments, TFF processing can comprise one or more concentration stages, such as an ultrafiltration (UF) or microfiltration (MF) concentration stage. In the concentration stage, a reduced amount of buffer material is replaced as the stream circulates through the filtration system (relative to the amount of buffer material lost as permeate). The failure to completely replace all of the buffer material lost in the permeate results in an increased concentration of viral particles within the filtration stream. In certain embodiments, an increased amount of buffer material is replaced as the stream circulates through the filtration system. The incorporation of excess buffer material relative to the amount of buffer material lost in the permeate results in a decreased concentration of viral particles within the filtration stream.

[0472] In certain embodiments, TFF processing can comprise one or more diafiltration (DF) stages. The diafiltration stage comprises replacement of a first buffer material (such as a high salt material) within a second buffer material (such a low-salt or zero-salt material). In this embodiment, a second buffer is added to flow stream which is different from a first buffer material lost in the permeate, resulting in an eventual replacement of buffer material in the stream.

[0473] In certain embodiments, TFF processing can comprise multiple stages in series. In certain embodiments, a TFF processing process can comprise an ultrafiltration (UF) concentration stage followed by a diafiltration stage (DF). In some embodiments, TFF comprising UF followed by DF results in increased rAAV recovery relative to TFF comprising DF followed by UF. In some embodiments, TFF comprising UF followed by DF results in about 70-80% recovery of rAAV.

[0474] In certain embodiments, a TFF processing can comprise a diafiltration stage followed by an ultrafiltration concentration stage. In certain embodiments, a TFF processing can comprise a first diafiltration stage, followed by an ultrafiltration concentration stage, followed by a second diafiltration stage. In certain embodiments, a TFF processing can comprise a first diafiltration stage which incorporates a high-salt-low-sugar buffer material into the flow stream, followed by an ultrafiltration/concentration stage which results in a high concentration of the viral material in the flow stream, followed by a second diafiltration stage which incorporates a low-salt-high-sugar or zero-salt-high-sugar buffer material into the flow stream. In certain embodiments, the salt can be sodium chloride, sodium phosphate, potassium chloride, potassium phosphate, or a combination thereof. In certain embodiments, the sugar can be sucrose, such as a 5% w/v sucrose mixture or a 7% w/v sucrose mixture.

[0475] In certain embodiments, the one or more TFF steps can comprise a formulation diafiltration step in which at least a portion of the liquid media of the viral production pool is replaced with a high-sucrose formulation buffer. In certain embodiments, the high-sucrose formulation buffer comprises between 6-8% w/v of a sugar or sugar substitute and between 90-100 mM of an alkali chloride salt. In certain embodiments, the high-sucrose formulation buffer comprises 7% w/v of sucrose and between 90-100 mM sodium chloride. In certain embodiments, the high-sucrose formulation buffer comprises 7% w/v of sucrose, 10 mM Sodium Phosphate, between 95-100 mM sodium chloride, and 0.001% (w/v) Poloxamer 188. In certain embodiments, the formulation diafiltration step is the final diafiltration step in the one or more TFF steps. In certain embodiments, the formulation diafiltration step is the only diafiltration step in the one or more TFF steps.

[0476] In certain embodiments, TFF processing can comprise multiple stages which occur contemporaneously. As a non-limiting example, a TFF clarification process can comprise an ultrafiltration stage which occurs contemporaneously with a concentration stage.

[0477] Methods of cell lysate clarification and purification by filtration are well understood in the art and may be carried out according to a variety of available methods comprising, but not limited to passive filtration and flow filtration. Filters used may comprise a variety of materials and pore sizes. For example, cell lysate filters may comprise pore sizes of from about 1 μM to about 5 μM, from about 0.5 μM to about 2 μM, from about 0.1 μM to about 1 μM, from about 0.05 μM to about 0.05 μM and from about 0.001 μM to about 0.1 μM. Exemplary pore sizes for cell lysate filters may comprise, but are not limited to, 2.0, 1.9, 1.8, 1.7, 1.6, 1.5, 1.4, 1.3, 1.2, 1.1, 1, 0.9, 0.8, 0.7, 0.6, 0.5, 0.4, 0.3, 0.2, 0.1, 0.95, 0.9, 0.85, 0.8, 0.75, 0.7, 0.65, 0.6, 0.55, 0.5, 0.45, 0.4, 0.35, 0.3, 0.25, 0.2, 0.15, 0.1, 0.05, 0.22, 0.21, 0.20, 0.19, 0.18, 0.17, 0.16, 0.15, 0.14, 0.13, 0.12, 0.11, 0.1, 0.09, 0.08, 0.07, 0.06, 0.05, 0.04, 0.03, 0.02, 0.01, 0.02, 0.019, 0.018, 0.017, 0.016, 0.015, 0.014, 0.013, 0.012, 0.011, 0.01, 0.009, 0.008, 0.007, 0.006, 0.005, 0.004, 0.003, 0.002, 0.001 and 0.001 μM. In certain embodiments, clarification may comprise filtration through a filter with 2.0 μM pore size to remove large debris, followed by passage through a filter with 0.45 μM pore size to remove intact cells.

[0478] Filter materials may be composed of a variety of materials. Such materials may comprise, but are not limited to, polymeric materials and metal materials (e.g., sintered metal and pored aluminum.) Exemplary materials may comprise, but are not limited to nylon, cellulose materials (e.g., cellulose acetate), polyvinylidene fluoride (PVDF), polyethersulfone, polyamide, polysulfone, polypropylene, and polyethylene terephthalate. In certain embodiments, filters useful for clarification of cell lysates may comprise, but are not limited to ULTIPLEAT PROFILE™ filters (Pall Corporation, Port Washington, N.Y.), SUPOR™ membrane filters (Pall Corporation, Port Washington, N.Y.).

[0479] In certain embodiments, flow filtration may be carried out to increase filtration speed and/or effectiveness. In certain embodiments, flow filtration may comprise vacuum filtration. According to such methods, a vacuum is created on the side of the filter opposite that of cell lysate to be filtered. In certain embodiments, cell lysates may be passed through filters by centrifugal forces. In certain embodiments, a pump is used to force cell lysate through clarification filters. Flow rate of cell lysate through one or more filters may be modulated by adjusting one of channel size and/or fluid pressure.

### Clarification and Purification: Chromatography

[0480] In certain embodiments, AAV particles in a formulation may be clarified and purified from cell lysates through one or more chromatography steps using one or more different methods of chromatography. Chromatography refers to any number of methods known in the art for selectively separating out one or more elements from a mixture. Such methods may comprise, but are not limited to, ion exchange chromatography (e.g., cation exchange chromatography and anion exchange chromatography), affinity chromatography (e.g., immunoaffinity chromatography, metal affinity chromatography, pseudo affinity chromatography such as Blue Sepharose resins), hydrophobic interaction chromatography (HIC), size-exclusion chromatography, and multimodal chromatography (MMC) (chromatographic methods that utilize more than one form of interaction between the stationary phase and analytes). In certain embodiments, methods or systems of viral chromatography may comprise any of those taught in U.S. Pat. Nos. 5,756,283, 6,258,595, 6,261,551, 6,270,996, 6,281,010, 6,365,394, 6,475,769, 6,482,634, 6,485,966, 6,943,019, 6,953,690, 7,022,519, 7,238,526, 7,291,498 and 7,491,508 or International Publication Nos. WO1996039530, WO1998010088, WO1999014354, WO1999015685, WO1999047691, WO2000055342, WO2000075353 and WO2001023597, the contents of each of which are herein incorporated by reference in their entirety.

[0481] Chromatography systems of the present disclosure can be pre-rinsed, packed, equilibrated, flushed, processed, eluted, washed or cleaned with formulations known to those in the art, comprising AAV pharmaceutical, processing and storage formulations of the present disclosure.

[0482] In certain embodiments, one or more ion exchange (IEX) chromatography steps may be used to isolate viral particles. The ion exchange step can comprise anion exchange (AEX) chromatography, cation exchange (CEX) chromatography, or a combination thereof. In certain embodiments, ion exchange chromatography is used in a bind/elute mode. Bind/elute IEX can be used by binding viral particles to a stationary phase based on charge-charge interactions between capsid proteins (or other charged components) of the viral particles and charged sites present on the stationary phase. This process can comprise the use of a column through which viral preparations (e.g., clarified lysates) are passed. After application of viral preparations to the charged stationary phase (e.g., column), bound viral particles may then be eluted from the stationary phase by applying an elution solution to disrupt the charge-charge interactions. Elution solutions may be optimized by adjusting salt concentration and/or pH to enhance recovery of bound viral particles. In certain embodiments, the elution solution can comprise a nuclease such as Benzonase nuclease. Depending on the charge of viral capsids being isolated, cation or anion exchange chromatography methods may be selected. In certain embodiments, ion exchange chromatography is used in a flow-through mode. Flow-through IEX can be used by binding non-viral impurities or unwanted viral particles to a stationary phase (based on charge-charge interactions) and allowing the target viral particles in the viral preparation to “flow through” the IEX system into a collection pool.

[0483] Methods or systems of ion exchange chromatography may comprise, but are not limited to any of those taught in U.S. Pat. Nos. 7,419,817, 6,143,548, 7,094,604, 6,593,123, 7,015,026 and 8,137,948, the contents of each of which are herein incorporated by reference in their entirety.

[0484] In certain embodiments, the IEX process uses an AEX chromatography system such as a Sartorius Sartobind Q membrane, a Sartorius Sartobind STIC membrane, a Millipore Fractogel TMAE HiCap(m) Flow-Through membrane, a GE Q Sepharose HP membrane, Poros XQ or Poros HQ. In certain embodiments, the IEX process uses a CEX system such as a Poros XS membrane. In certain embodiments, the AEX system comprises a stationary phase which comprises a trimethylammoniumethyl (TMAE) functional group. In certain embodiments, the IEX process uses a Multimodal Chromatography (MMC) system such as a Nuvia aPrime 4A membrane.

[0485] In certain embodiments, one or more affinity chromatography steps, such as immunoaffinity chromatography, may be used to isolate viral particles. Immunoaffinity chromatography is a form of chromatography that utilizes one or more immune compounds (e.g., antibodies or antibody-related structures) to retain viral particles. Immune compounds may bind specifically to one or more structures on viral particle surfaces, comprising, but not limited to one or more viral coat protein. In certain embodiments, immune compounds may be specific for a particular viral variant. In certain embodiments, immune compounds may bind to multiple viral variants. In certain embodiments, immune compounds may comprise recombinant single-chain antibodies. Such recombinant single chain antibodies may comprise those described in Smith, R. H. et al., 2009. Mol. Ther. 17(11):1888-96, the contents of which are herein incorporated by reference in their entirety. Such immune compounds (e.g., recombinant protein ligands) are capable of binding to several AAV capsid variants, comprising, but not limited to AAV1, AAV2, AAV3, AAV5, AAV6 and/or AAV8 or any of those taught herein. In some embodiments, such immune compounds (e.g., recombinant protein ligands) are capable of binding to at least AAV2. In certain embodiments, the AFC process uses a GE AVB Sepharose HP column resin, Poros CaptureSelect AAV8 resins (ThermoFisher), Poros CaptureSelect AAV9 resins (ThermoFisher) and Poros CaptureSelect AAVX resins (ThermoFisher).

[0486] In some embodiments, one or more affinity chromatography steps precedes one or more anion exchange chromatography steps. In some embodiments, one or more anion exchange chromatography steps precedes one or more affinity chromatography steps.

[0487] In certain embodiments, one or more size-exclusion chromatography (SEC) steps may be used to isolate viral particles. SEC may comprise the use of a gel to separate particles according to size. In viral particle purification, SEC filtration is sometimes referred to as “polishing.” In certain embodiments, SEC may be carried out to generate a final product that is near-homogenous. Such final products may in certain embodiments be used in pre-clinical studies and/or clinical studies (Kotin, R. M. 2011. Human Molecular Genetics. 20(1):R2-R6, the contents of which are herein incorporated by reference in their entirety.) In certain embodiments, SEC may be carried out according to any of the methods taught in U.S. Pat. Nos. 6,143,548, 7,015,026, 8,476,418, 6,410,300, 8,476,418, 7,419,817, 7,094,604, 6,593,123, and 8,137,948, the contents of each of which are herein incorporated by reference in their entirety.

[0488] In some embodiments, purification of recombinant AAV produces a total rAAV process yield of 30-50%.

### Exemplary Embodiments of rAAV Production Steps

[0489] The method steps described in the following paragraphs may be used in a method for producing rAAV comprising a polynucleotide encoding AADC or a functional variant thereof in any combination or permutation, unless otherwise specified. Non-limiting steps, combinations, and permutations are provided below.

[0490] In some embodiments, the present disclosure encompasses a method for producing rAAV comprising a polynucleotide encoding AADC or a functional variant thereof, wherein the method comprises culturing viral production cells (VPCs), such as but not limited to Sf9 cells (“viral production Sf9 cells”) to a target cell density (viable cell density (“VCD”)) of 3.0×10⁶-3.4×10⁶ cells/mL. In some embodiments, the VCD is 3.2×10⁶-3.4×10⁶ cells/mL. In some embodiments, the VCD is about 3.2×10⁶ cells/mL. In some embodiments, once the VPCs reach the target cell density (e.g., about 3.2×10⁶ cells/mL), the VPCs are incubated with baculoviruses comprising a viral expression construct (e.g., for expressing Rep and/or Cap proteins) (“expressionBacs”) and baculoviruses comprising a payload construct (e.g., for expressing AADC) (“payloadBacs”). In some embodiments, once the VPCs reach the target cell density (e.g., about 3.2×10⁶ cells/mL), the VPCs are incubated with baculovirus infected insect cells comprising expressionBacs (“expressionBIICs”) and baculovirus infected insect cells comprising payloadBacs (“payloadBIICs”). In some embodiments, the ratio of expressionBIICs to payloadBIICs is about 1:3 (v/v). In some embodiments, the ratio of expressionBIICs to VPCs is about 1:300,000 (v/v). In some embodiments, the ratio of payloadBIICs to VPCs is about 1:100,000 (v/v). In some embodiments, the VPCs are Sf9 cells (i.e., “viral production Sf9 cells”). In some embodiments the expressionBacs are Sf9 cells. In some embodiments, the payloadBacs are Sf9 cells. In some embodiments, the VPCs (e.g., Sf9 cells) are incubated in serum-free, protein-free insect cell culture medium. In some embodiments, the VPCs (e.g., Sf9 cells) are incubated in serum-free, protein-free insect cell culture medium comprising L-glutamine and poloxamer-188. In some embodiments, the VPCs (e.g., Sf9 cells) are incubated in ESF AF Insect Cell Culture Medium. In some embodiments, incubation in ESF AF Insect Cell Culture Medium increases titer at least 2-fold compared to SFX Insect Cell Culture Media.

[0491] In some embodiments, expressionBIICs are introduced to a culture of VPCs at an expressionBIIC:VPC ratio of about 1:300,000 (v/v) and payloadBIICs are introduced to the culture at a payloadBIIC:VPC ratio of about 1:100,000 (v/v) (wherein the expressionBIIC:payloadBIIC ratio is about 1:3), and these BIICs are introduced to the culture once the VPCs have reached a target cell density of about 3.2×10⁶ cells/mL. In some embodiments, introducing the expressionBIICs and payloadBIICs to the VPCs at these ratios (1:300,000 (v/v) and 1:100,000 (v/v), respectively) and when VPCs have reached a target cell density of about 3.2×10⁶ cells/mL results in an increase in rAAV productivity relative to a method comprising a lower expressionBIIC:VPC ratio, a lower payload:VPC ratio, and/or a lower VPC target cell density. In some embodiments, introducing the expressionBIICs and payloadBIICs to the VPCs at these ratios (1:300,000 (v/v) and 1:100,000 (v/v), respectively) and when VPCs have reached a target cell density of about 3.2×10⁶ cells/mL results in an increase in rAAV productivity relative to a method comprising an expressionBIIC:VPC ratio of 1:250,000 (v/v), a payload:VPC ratio of 1:50,000, and a VPC target cell density of about 2.7×10⁶-2.8×10⁶ cells/mL (e.g., 2.75×10⁶ cells/mL). In some embodiments, the relative increase in rAAV productivity is at least 10-fold. In some embodiments, the relative increase in rAAV productivity of about 10-fold.

[0492] In some embodiments, expressionBIICs are introduced to a culture of VPCs at an expressionBIIC:VPC ratio of about 1:300,000 (v/v) and payloadBIICs are introduced to the culture at a payloadBIIC:VPC ratio of about 1:100,000 (v/v) (wherein the expressionBIIC:payloadBIIC ratio is about 1:3), and these BIICs are introduced to the culture once the VPCs have reached a target cell density of about 3.2×10⁶ cells/mL, and the resulting rAAV productivity is at least 4×10¹¹ vg/mL.

[0493] In some embodiments, a method for producing rAAV comprising a polynucleotide encoding AADC or a functional variant thereof comprises introducing expressionBIICs to a culture of VPCs at an expressionBIIC:VPC ratio of about 1:300,000 (v/v) and introducing payloadBIICs to the culture at a payloadBIIC:VPC ratio of about 1:100,000 (v/v) (wherein the expressionBIIC:payloadBIIC ratio is about 1:3), such that the BIICs are introduced to the culture once the VPCs have reached a target cell density of about 3.2×10⁶ cells/mL, and further comprising incubating the VPCs under conditions that result in the production of one or more rAAVs within one or more VPCs, and lysing the VPCs. In some embodiments, lysis comprises a chemical lysis solution lacking detectable nuclease. In some embodiments, the method further comprises one or more clarification steps. In some embodiments, the method further comprises one or more chromatography steps. In some embodiments, the one or more chromatography steps comprises immunoaffinity chromatography. In some embodiments, the one or more chromatography steps comprises anion exchange chromatography. In some embodiments, the one or more chromatography steps comprises immunoaffinity chromatography and anion exchange chromatography. In some embodiments, the method further comprises tangential flow filtration (TFF). In some embodiments, the method further comprises ultrafiltration. In some embodiments, the method further comprises diafiltration. In some embodiments, the method further comprises one or more tangential flow filtration (TFF) steps, comprising ultrafiltration followed by diafiltration. In some embodiments, the method further comprises one or more viral retentive filtration (VRF) steps. In some embodiments, the method further comprises further filtration steps, which may occur before or after any of the steps or processes described above.

[0494] In some embodiments, the present disclosure encompasses a method for producing rAAV comprising a polynucleotide encoding AADC or a functional variant thereof, wherein the method comprises one or more anion exchange chromatography steps. In some embodiments, the method produces higher rAAV yield (e.g., concentration) relative to a method comprising one or more cation exchange chromatography steps. In some embodiments, the method produces higher rAAV purity (e.g., fewer contaminants, such as baculoviral contaminants or VPC protein contaminants) relative to a method comprising one or more cation exchange chromatography steps. In some embodiments, the one or more anion exchange chromatography steps follows one or more immunoaffinity chromatography steps. In some embodiments, the one or more anion exchange chromatography steps precedes one or more immunoaffinity chromatography steps. In some embodiments, prior to the one or more anion exchange chromatography steps, the method comprises introducing expressionBIICs and payloadBIICs to a culture of VPCs (e.g., incubating in serum-free, protein-free insect cell medium) once the VPCs have reached a target cell density, incubating the VPCs under conditions that result in the production of one or more rAAVs within one or more VPCs, and lysing the VPCs. In some embodiments, prior to the one or more anion exchange chromatography steps, the method comprises introducing expressionBIICs to a culture of VPCs at an expressionBIIC:VPC ratio of about 1:300,000 (v/v) and introducing payloadBIICs to the culture at a payloadBIIC:VPC ratio of about 1:100,000 (v/v) (wherein the expressionBIIC:payloadBIIC ratio is about 1:3), such that the BIICs are introduced to the culture once the VPCs have reached a target cell density of about 3.2×10⁶ cells/mL, and further comprising incubating the VPCs under conditions that result in the production of one or more rAAVs within one or more VPCs, and lysing the VPCs. In some embodiments, lysing the VPCs comprises a chemical lysis solution lacking detectable nuclease.

[0495] Further, in some embodiments, the method further comprises one or more clarification steps. In some embodiments, the one or more clarification steps comprises a C0SP filter. In some embodiments, the method further comprises tangential flow filtration (TFF). In some embodiments, the method further comprises ultrafiltration. In some embodiments, the method further comprises diafiltration. In some embodiments, the method further comprises one or more tangential flow filtration (TFF) steps, comprising ultrafiltration followed by diafiltration. In some embodiments, the method further comprises one or more viral retentive filtration (VRF) steps. In some embodiments, the method further comprises further filtration steps, which may occur before or after any of the steps or processes described above.

[0496] In some embodiments, the present disclosure encompasses a method for producing rAAV comprising a polynucleotide encoding AADC or a functional variant thereof, wherein the method comprises ultrafiltration followed by diafiltration. In some embodiments, the diafiltration comprises buffer exchange into a pharmaceutical formulation buffer. In some embodiments, the pharmaceutical formulation buffer comprises 10 mM sodium phosphate, 180 mM sodium chloride, and 0.001% poloxamer 188 (solution pH of 7.1-7.5, e.g., pH 7.3). In some embodiments, ultrafiltration comprises concentration of rAAV to a concentration of at least 5.0×10¹² vg/mL. In some embodiments, ultrafiltration comprises concentration of rAAV to a concentration of about 5.0×10¹² vg/mL. In some embodiments, the ultrafiltration followed by diafiltration results in improved recovery of rAAV compared to a method comprising diafiltration followed by ultrafiltration. In some embodiments, ultrafiltration followed by diafiltration results in about 70-80% recovery of rAAV. In some embodiments, ultrafiltration followed by diafiltration results in about 70-80% recovery of rAAV, whereas diafiltration followed by ultrafiltration results in about 40-60% recovery of rAAV. In some embodiments, prior to the one or more anion exchange chromatography steps, the method comprises introducing expressionBIICs and payloadBIICs to a culture of VPCs (e.g., incubating in serum-free, protein-free insect cell medium) once the VPCs have reached a target cell density, incubating the VPCs under conditions that result in the production of one or more rAAVs within one or more VPCs, and lysing the VPCs. In some embodiments, prior to the one or more anion exchange chromatography steps, the method comprises introducing expressionBIICs to a culture of VPCs at an expressionBIIC:VPC ratio of about 1:300,000 (v/v) and introducing payloadBIICs to the culture at a payloadBIIC:VPC ratio of about 1:100,000 (v/v) (wherein the expressionBIIC:payloadBIIC ratio is about 1:3), such that the BIICs are introduced to the culture once the VPCs have reached a target cell density of about 3.2×10⁶ cells/mL, and further comprising incubating the VPCs under conditions that result in the production of one or more rAAVs within one or more VPCs, and lysing the VPCs. In some embodiments, lysing the VPCs comprises a chemical lysis solution lacking detectable nuclease.

[0497] Further, in some embodiments, the method further comprises one or more clarification steps. In some embodiments, the one or more clarification steps comprises a C0SP filter. In some embodiments, the method further comprises one or more chromatography steps. In some embodiments, the one or more chromatography steps comprises immunoaffinity chromatography. In some embodiments, the one or more chromatography steps comprises anion exchange chromatography. In some embodiments, the one or more chromatography steps comprises immunoaffinity chromatography and anion exchange chromatography. In some embodiments, the method further comprises one or more viral retentive filtration (VRF) steps. In some embodiments, the method further comprises further filtration steps, which may occur before or after any of the steps or processes described above.

[0498] In any of the preceding embodiments, the method may produce a total rAAV process yield of 30-50%. In any of the preceding embodiments, the method may produce a total rAAV concentration of 3.0×10¹²-5.0×10¹² vg/mL. In any of the preceding embodiments, the method may produce a total rAAV concentration of about 5.0×10¹² vg/mL. In any of the preceding embodiments, the method may produce a total rAAV concentration of greater than 5.0×10¹² vg/mL. In any of the preceding embodiments, the method may produce higher rAAV yield (e.g., higher concentration) compared to a method comprising one or more of: a lower expressionBIIC:VPC ratio, a lower payload:VPC ratio, a lower VPC target cell density, one or more cation exchange chromatography steps, and/or diafiltration followed by ultrafiltration. In any of the preceding embodiments, the method may produce higher rAAV purity (e.g., fewer baculoviral contaminants, fewer VPC protein contaminants) compared to a method comprising one or more of: a lower expressionBIIC:VPC ratio, a lower payload:VPC ratio, a lower VPC target cell density, one or more cation exchange chromatography steps, and/or diafiltration followed by ultrafiltration.

[0499] For example, in any of the preceding embodiments, the method may produce higher rAAV yield (e.g., higher concentration) compared to a method comprising: introducing expressionBIICs to a culture comprising VPCs at an expressionBIIC:VPC ratio of 1:250,000 (v/v), introducing payloadBIICs to the culture at a payload:VPC ratio of 1:50,000, wherein the VPC target cell density at the time of introducing these BIICs is about 2.75×10⁶ cells/mL; incubating VPCs in SFX Insect Cell Culture Medium; lysing the VPCs in a solution comprising a nuclease; clarifying the lysed VPCs comprising depth filtration (e.g., using a DOHC filter) to yield a clarified lysate pool; processing the clarified lysate pool comprising immunoaffinity chromatography followed by cation exchange chromatography, yielding a chromatography pool; processing the chromatography pool comprising TFF comprising diafiltration followed by ultrafiltration, yielding a TFF pool; and processing the TFF pool comprising viral retentive filtration. Further, the method of any of the preceding embodiments may produce higher rAAV purity (e.g., fewer baculoviral contaminants, fewer VPC protein contaminants) compared to a method comprising: introducing expressionBIICs to a culture comprising VPCs at an expressionBIIC:VPC ratio of 1:250,000 (v/v), introducing payloadBIICs to the culture at a payload:VPC ratio of 1:50,000, wherein the VPC target cell density at the time of introducing these BIICs is about 2.75×10⁶cells/mL; incubating VPCs in SFX Insect Cell Culture Medium; lysing the VPCs in a solution comprising a nuclease; clarifying the lysed VPCs comprising depth filtration (e.g., using a DOHC filter) to yield a clarified lysate pool; processing the clarified lysate pool comprising immunoaffinity chromatography followed by cation exchange chromatography, yielding a chromatography pool; processing the chromatography pool comprising TFF comprising diafiltration followed by ultrafiltration, yielding a TFF pool; and processing the TFF pool comprising viral retentive filtration.

[0500] In any of the preceding embodiments, the rAAV produced by the method comprise a viral capsid ratio VP1:VP2:VP3 of about 1:1:10.

[0501] In any of the preceding embodiments, the method may produce a purified drug substance comprising a purified rAAV formulation, e.g., one which is aseptically filled into a glass vial, e.g., wherein the vial is a 2 mL Ompi Glass Vial. In some embodiments, the vial comprises a 1.0-2.0 mL fill volume and 0.75-1.75 mL extractable volume of the purified drug substance. In some embodiments, the vial comprises an about 1.2 mL fill volume and an about 1.0 mL extractable volume of the purified drug substance. In some embodiments, the vial is stoppered using a 13 mm West S2-F451 4432/50 stopper and sealed with a 13 mm West Pharma Flip Off Long Matte Seal.

[0502] In any of the preceding embodiments, the method may produce a total rAAV concentration of ≥3.0×10¹² vg/mL. In any of the preceding embodiments, the method may produce a total rAAV concentration of about 3.0×10¹² vg/mL to about 5.0×10¹² vg/mL. In any of the preceding embodiments, the method may produce a total rAAV concentration of about 5.0×10¹² vg/mL.

[0503] In any of the preceding embodiments, the method may produce a purified drug substance that has an infectious AAV viral titer of greater than 3×10¹⁰ TU/mL.

[0504] In any of the preceding embodiments, the method may produce a purified drug substance that has a particle-to-infectious unit ratio of less than about 100 vg/TU. An infectious titer ratio or particle-to-infectious unit ratio as used herein refers to the proportion of total viral particles that are infectious. A higher particle-to-infectious unit ratio typically indicates lower infectivity. In certain embodiments, the particle-to-infectious unit ratio may be determined by a median tissue culture infectious dose 50 (TCID50) assay.

[0505] In any of the preceding embodiment, the method may produce a purified composition of rAAV comprising a polynucleotide encoding AADC (e.g., SEQ ID NO: 979). In some embodiments, the composition has an AADC relative potency of at least 50% as compared to a viral vector reference standard (e.g., a viral vector with known AADC activity). In certain embodiments, the rAAV has an AADC relative potency of about 50% to about 250% as compared to a viral vector standard. In certain embodiments, the rAAV has an AADC relative potency of at least 50%, at least 60%, at least 70%, at least 80%, at least 90%, at least 100%, at least 110%, at least 120%, at least 130%, at least 140%, at least 150%, at least 160%, at least 170%, at least 180%, at least 190%, at least 200%, or greater, as compared to a viral reference standard. In certain embodiments, the AADC relative potency may be determined by infection of permissive cells using the purified rAAV formulation and measuring AADC activity using high performance liquid chromatography (HPLC). In certain embodiments, the AADC relative potency may be determined by comparing the amount of dopamine produced by cells infected with the rAAV to the amount of dopamine produced by a viral reference standard.

[0506] In any of the preceding embodiments, the method may produce a purified rAAV composition comprising ≤40% empty viral particles. In any of the preceding embodiments, the method may produce a purified rAAV composition comprising less than about 40% empty viral capsids, less than about 30% empty viral capsids, less than about 20% empty viral capsids, less than about 10% empty viral capsids, less than about 5% empty viral capsids, less than about 2% empty viral capsids, or less. In certain embodiments, the percentage of empty viral capsids in the purified rAAV composition may be determined by gradient centrifugation or ultracentrifugation (e.g., analytical ultracentrifugation). In certain embodiments, the percentage of empty viral capsids in the purified rAAV composition may be determined by UV absorbance.

[0507] In any of the preceding embodiments, the method may produce a purified rAAV formulation comprising greater than about 60% full viral capsids, greater than about 70% full viral capsids, greater than about 80% full viral capsids, greater than about 90% full viral capsids, greater than about 95% full viral capsids, greater than about 97% full viral capsids, greater than about 99% viral capsids, or greater. In certain embodiments, the percentage of full capsids may be determined by gradient centrifugation or ultracentrifugation (e.g., analytical ultracentrifugation). In certain embodiments, the percentage of full capsids may be determined by UV absorbance.

[0508] In any of the preceding embodiments, the method may produce a purified rAAV composition that has an osmolality of 300-400 mOsm/kg. In some embodiments, the osmolality of the composition is in accordance with United States Pharmacopoiea (USP), e.g., USP <785>, Ph. Eur. 2.2.35, the content of which is incorporated herein by its entirety.

[0509] In any of the preceding embodiments, the method may produce a purified rAAV composition comprising less than about 6000 particles with a size of ≥10 μm and less than about 600 particles with a size of ≥25 μm.

[0510] In any of the preceding embodiments, the method may produce a purified rAAV formulation that has a pH of about 7.3 (e.g., pH 7.3±0.5). In some embodiments, the pH of the composition is in accordance with United States Pharmacopoiea (USP), e.g., USP <791>, Ph. Eur. 2.2.3, the content of which is incorporated herein by its entirety.

[0511] In any of the preceding embodiments, the method may produce a purified rAAV composition that has endotoxin levels of less than about 1 EU/mL. In some embodiments, the endotoxin levels of the composition is in accordance with United States Pharmacopoiea (USP), e.g., USP <85>, Ph. Eur. 2.6.14, the content of which is incorporated herein by its entirety.

[0512] In any of the preceding embodiments, the method may produce a purified rAAV composition that exhibits a bioburden of less than 1 CFU/10 mL. In some embodiments, the bioburden of the composition disclosed herein is in accordance with United States Pharmacopoiea (USP), e.g., USP <61>, Ph. Eur. 2.6.12, the content of which is incorporated herein by reference in its entirety.

[0513] In any of the preceding embodiments, the method may produce a purified drug substance that has a protein purity of greater than about 90% (e.g., product-related protein represents ≥90% of total protein and no other proteins are present at greater than about 5% as determined by Capillary Electrophoresis Sodium Dodecyl Sulfate (CE-SDS)).

[0514] In any of the preceding embodiments, the method may produce a purified drug substance comprising a purified rAAV composition, wherein the rAAV composition comprises rAAV comprising a polynucleotide encoding AADC (e.g., SEQ ID NO: 979) or a functional variant thereof and an AAV2 viral capsid and wherein the composition has an AADC relative potency of at least 50%, wherein the composition comprises greater than or equal to 3.0×10¹² vg/mL (e.g., about 5.0×10¹² vg/mL) of rAAVs. In some embodiments, the AAV2 viral capsid is encoded by the nucleic acid sequence of SEQ ID NO: 1778. In some embodiments, the AAV2 viral capsid comprises the amino acid sequence of SEQ ID NO: 16. In some embodiments, the rAAVs are present in a solution comprising 5-15 mM sodium phosphate, 150-250 mM sodium chloride, and 0.001-0.005% poloxamer (solution pH of 7.3±0.5), wherein the rAAV formulation comprises greater than about 60% full viral capsids (e.g., less than about 40% empty viral capsids), less than about 1 EU/mL endotoxin levels, greater than about 90% protein purity, and greater than about 3×10¹⁰ TU/mL infectious titer. In some embodiments, the rAAV composition has an osmolality of 300-400 mOsm/kg. In some embodiments, the rAAV composition comprises less than about 6000 particles with a size of ≥10 μm and less than about 600 particles with a size of ≥25 μm.

### Exemplary Embodiment of an rAAV Production Method

[0515] The present disclosure presents methods and systems for producing recombinant adeno-associated viruses (rAAVs).

[0516] In certain embodiments, the present disclosure encompasses a method for producing rAAV comprising a polynucleotide encoding aromatic L-amino acid decarboxylase (AADC) or a functional variant thereof. In some embodiments, the method comprises the steps of culturing viral production cells (VPCs) in a bioreactor to a target cell density; introducing into the bioreactor at least one baculovirus (expressionBac) comprising a viral expression construct, and at least one baculovirus (payloadBac) comprising a payload construct, wherein the viral expression construct comprises an adeno-associated virus (AAV) viral expression construct, and wherein the payload construct comprises the polynucleotide encoding AADC or a functional variant thereof; incubating the VPCs in the bioreactor under conditions that result in the production of one or more rAAVs within one or more VPCs, wherein one or more of the rAAVs comprise the polynucleotide encoding AADC or a functional variant thereof; harvesting a viral production pool from the bioreactor, wherein the viral production pool comprises one or more VPCs comprising one or more rAAVs; lysing the one or more VPCs in the viral production pool, thereby releasing one or more rAAVs from the one or more VPCs into a lysis medium; and processing the lysis medium. In some embodiments, the processing step comprises one or more clarifying steps; one or more immunoaffinity chromatography steps; one or more anion exchange chromatography steps; one or more tangential flow filtration (TFF) steps, wherein the one or more TFF steps comprises ultrafiltration followed by diafiltration; and one or more virus retentive filtration (VRF) steps, wherein the processing may further comprise one or more filtration steps before or after any one or more of the processing steps described above. In certain embodiments, the VPCs are insect cells, e.g., Sf9 cells. In some embodiments, the polynucleotide encoding AADC or a functional variant thereof encodes SEQ ID NO: 978.

[0517] In some embodiments, the at least one baculovirus (expressionBac) comprising a viral expression construct is comprised in at least one baculovirus infected insect cell (expressionBIIC). In some embodiments, the baculovirus infected insect cell (expressionBIIC) comprising at least one expressionBac is an Sf9 cell. In some embodiments, the at least one baculovirus (payloadBac) comprising a payload construct is comprised in at least one baculovirus infected insect cell (payloadBIIC). In some embodiments, the baculovirus infected insect cell (payloadBIIC) comprising at least one payloadBac is an Sf9 cell.

[0518] In certain embodiments, the present disclosure encompasses a method for producing a recombinant adeno-associated virus (rAAV) comprising a polynucleotide encoding aromatic L-amino acid decarboxylase (AADC) or a functional variant thereof. In some embodiments, the method comprises the steps of: (a) culturing viral production cells (VPCs) in a bioreactor to a target cell density; (b) introducing into the bioreactor at least one baculovirus (expressionBac) comprising a viral expression construct, and at least one baculovirus (payloadBac) comprising a payload construct, wherein the viral expression construct comprises an adeno-associated virus (AAV) viral expression construct, and wherein the payload construct comprises the polynucleotide encoding AADC or a functional variant thereof; (c) incubating the VPCs in the bioreactor under conditions that result in the production of one or more rAAVs within one or more VPCs, wherein one or more of the rAAVs comprise the polynucleotide encoding AADC or a functional variant thereof; (d) harvesting a viral production pool from the bioreactor, wherein the viral production pool comprises one or more VPCs comprising one or more rAAVs; (e) lysing the one or more VPCs in the viral production pool by chemical lysis, thereby releasing one or more rAAVs from the one or more VPCs into a lysis medium; (f) clarifying the lysis medium of (e) through one or more clarifying steps, yielding a clarification pool, wherein the clarification pool is optionally filtered; (g) processing the clarification pool of (f) through one or more immunoaffinity chromatography steps, yielding an immunoaffinity chromatography pool, wherein the one or more immunoaffinity chromatography steps optionally comprises neutralizing the immunoaffinity chromatography pool, and wherein the immunoaffinity chromatography pool is optionally filtered; (h) processing the immunoaffinity chromatography pool of (g) through one or more anion exchange chromatography steps, yielding an anion exchange chromatography pool, wherein the anion exchange chromatography pool is optionally filtered; (i) processing the anion exchange chromatography pool of (h) through one or more tangential flow filtration (TFF) steps, wherein the one or more TFF steps comprises ultrafiltration followed by diafiltration, wherein the one or more TFF steps yields a concentrated, buffer-exchanged pool, wherein the concentrated, buffer-exchanged pool is optionally filtered; and (j) processing the concentrated, buffer-exchanged pool of (i) through one or more virus retentive filtration (VRF) steps, yielding a viral filtration pool comprising rAAVs comprising a polynucleotide encoding AADC or a functional variant thereof, wherein the viral filtration pool is optionally filtered. In some embodiments, the viral filtration pool of step (j) is further processed through a filtration step. In certain embodiments, the VPCs are insect cells. In some embodiments, the insect cells are Sf9 cells. In some embodiments, the polynucleotide encoding AADC or a functional variant thereof encodes SEQ ID NO: 978.

[0519] In some embodiments, the at least one baculovirus (expressionBac) comprising a viral expression construct is comprised in at least one baculovirus infected insect cell (expressionBIIC). In some embodiments, the baculovirus infected insect cell (expressionBIIC) comprising at least one expressionBac is an Sf9 cell. In some embodiments, the at least one baculovirus (payloadBac) comprising a payload construct is comprised in at least one baculovirus infected insect cell (payloadBIIC). In some embodiments, the baculovirus infected insect cell (payloadBIIC) comprising at least one payloadBac is an Sf9 cell.

[0520] In some embodiments, the payload construct comprises a 5′ inverted terminal repeat (ITR), at least one multiple cloning site (MCS) region, a cytomegalovirus (CMV) enhancer, a CMV promoter, an intron region comprising immediate-early 1 (Ie1) exon 1, Ie1 intron 1 (partial), human beta-globin (hBglobin) intron 2, and hBglobin intron 3, a polyadenylation (poly(A)) signal, and a 3′ ITR. In some embodiments, the payload construct comprises, e.g., in order from 5′ to 3′: a 5′ ITR comprising SEQ ID NO: 980, a first MCS region comprising SEQ ID NO: 981, a CMV enhancer comprising SEQ ID NO: 982, a CMV promoter comprising SEQ ID NO: 983, an intron region comprising an Ie1 exon 1 (SEQ ID NO: 984), a partial Ie1 intron 1 (SEQ ID NO: 985), a human beta-globin (hBglobin) intron 2 (SEQ ID NO: 986), and a hBglobin intron 3 (SEQ ID NO: 987), a polynucleotide encoding an AADC amino acid sequence comprising SEQ ID NO: 978, wherein optionally the polynucleotide comprises SEQ ID NO: 988, a poly(A) signal comprising SEQ ID NO: 990, and a 3′ ITR comprising SEQ ID NO: 991. In some embodiments, the payload construct comprises a sequence at least 90%, at least 95%, at least 96%, at least 97%, at least 98%, or at least 99% identical to SEQ ID NO: 979. In some embodiments, the payload construct comprises SEQ ID NO: 979.

[0521] In some embodiments, the at least one expressionBIIC is introduced into the bioreactor at a ratio of 1:250,000 to 1:350,000 (v/v) relative to VPCs (e.g., 1:300,000 expressionBIIC:VPC (v/v)) and/or the at least one payloadBIIC is introduced into the bioreactor at a ratio of 1:50,000 to 1:150,000 (v/v) relative to VPCs (e.g., 1:100,000 payloadBIIC:VPC (v/v)).

[0522] In some embodiments, the VPCs are cultured in the bioreactor in insect cell culture medium. In some embodiments, the insect cell culture medium is a serum free, protein-free medium, wherein optionally the insect cell culture medium comprises L-glutamine and poloxamer 188, wherein further optionally the insect cell culture medium comprises EFS AF™ insect cell culture medium.

[0523] In some embodiments, the VPCs are cultured in the bioreactor at 26° C.-28° C. (e.g., 27° C.) and 30%-50% (e.g., 40%) dissolved oxygen.

[0524] In some embodiments, the target cell density (i.e., viable cell density (VCD)) of VPCs prior to introduction of the expressionBIICs (or expressionBacs) and payloadBIICs (or payloadBacs) is about 3.0×10⁶-3.4×10⁶ cells/mL (e.g., 3.2×10⁶-3.4×10⁶ cells/mL; e.g., 3.2×10⁶ cells/mL).

[0525] In some embodiments, the target cell density (i.e., viable cell density (VCD)) of VPCs prior to introduction of the expressionBIICs and payloadBIICs is about 3.0×10⁶-3.4×10⁶ cells/mL (e.g., 3.2×10⁶-3.4×10⁶ cells/mL; e.g., 3.2×10⁶ cells/mL), the at least one expressionBIIC is introduced into the bioreactor at a ratio of 1:300,000 expressionBIIC:VPC (v/v)), and the at least one payloadBIIC is introduced into the bioreactor at a ratio of 1:100,000 payloadBIIC:VPC (v/v)). In some embodiments, one or more of the VPCs, expressionBIICs, and/or payloadBIICs are Sf9 cells. In some embodiments, all of the VPCs, expressionBIICs, and payloadBIICs are Sf9 cells.

[0526] In some embodiments, the lysing step comprises a chemical lysis solution comprising a surfactant and arginine or a salt thereof, wherein optionally the surfactant is octyl phenol ethoxylate and the arginine or salt thereof is arginine hydrochloride. In some embodiments, the chemical lysis solution comprises 0.5% (w/v) octyl phenol ethoxylate (e.g., Triton X-100) and 200 mM arginine hydrochloride. In some embodiments, the lysis pH is 6.8-7.5. In some embodiments, the chemical lysis solution is free of detectable nuclease. In some embodiments, the lysing is carried out for 4-6 hours (e.g., 4 hours) at 26° C.-28° C. (e.g., 27° C.). In some embodiments, the one or more clarifying steps comprises depth filtration followed by filtration through an about 0.2 μm filter.

[0527] In some embodiments, the one or more immunoaffinity chromatography steps comprises an immunoaffinity chromatography column comprising a recombinant protein ligand that binds at least AAV2, and optionally binds at least AAV1, AAV2, AAV3, and AAV5. In some embodiments, the immunoaffinity chromatography column is equilibrated with a solution comprising 50 mM sodium phosphate, 350 mM sodium chloride and 0.001% w/v poloxamer 188 (e.g., solution pH of 7.2-7.6, e.g., pH of 7.4); flushed with a solution comprising 50 mM sodium phosphate, 350 mM sodium chloride and 0.001% w/v poloxamer 188 (e.g., solution pH of 7.2-7.6, e.g., pH of 7.4); washed with a solution comprising 20 mM sodium citrate, 1 M sodium chloride and 0.001% w/v poloxamer 188 (e.g., solution pH of 5.8-6.2, e.g., pH of 6.0); and washed a second time with a solution of 10 mM sodium citrate, 350 mM sodium chloride and 0.001% w/v poloxamer 188 (e.g., solution pH of 5.8-6.2, e.g., pH of 6.0); wherein the one or more immunoaffinity chromatography steps yields a immunoaffinity chromatography pool. In some embodiments, the filtered product is eluted with a solution comprising 20 mM sodium citrate, 350 mM sodium chloride and 0.001% w/v poloxamer 188 (e.g., solution pH of 2.8-3.2, e.g., pH of 3.0). In some embodiments, the immunoaffinity chromatography pool is neutralized with 2 M Tris Base and 0.001% w/v poloxamer 188 (3.0% v/v spike, pH 8.0-8.5). In some embodiments, the immunoaffinity chromatography pool is filtered through an about 0.2 μm filter.

[0528] In some embodiments, the one or more immunoaffinity chromatography steps comprises loading the immunoaffinity chromatography column with a 1.0×10¹³-5.0×10¹³ vg/mL-r load challenge at 18-25° C.

[0529] In some embodiments, the one or more anion exchange chromatography steps comprises charging and equilibrating an anion exchange chromatography column with a solution comprising 20 mM Tris, 2 M sodium chloride and 0.001% w/v poloxamer 188, then a solution of 40 mM Tris, 170 mM sodium chloride and 0.001% w/v poloxamer 188 (e.g., solution pH of 7.8-8.2, e.g., pH of 8.0). In some embodiments, the anion exchange chromatography column is flushed and eluted with a solution comprising 40 mM Tris, 170 mM sodium chloride and 0.001% w/v poloxamer 188 (e.g., solution pH of 8.3-8.7, e.g., pH of 8.5), yielding an anion exchange chromatography pool. In some embodiments, the anion exchange chromatography elution pool is filtered through an about 0.2 μm filter.

[0530] In some embodiments, the one or more anion exchange chromatography steps comprises loading the anion exchange chromatography column with a 1.0×10¹³-5.0×10¹³ vg/mL-r load challenge at 18-25° C.

[0531] In some embodiments, the one or more TFF steps comprises TFF filtration with a TFF filter, yielding a TFF load pool, followed by concentration of the TFF load pool by ultrafiltration followed by diafiltration, yielding a final TFF load pool. In some embodiments, the TFF filtration comprises equilibration with a buffer (e.g., pH 8.3-8.7, e.g., pH 8.5) comprising 40 mM Tris, 170 mM sodium chloride, and 0.001% (w/v) poloxamer 188. In some embodiments, after obtaining the TFF load pool, the TFF filter is subjected to a recovery flush using a buffer comprising 10 mM sodium phosphate, 180 mM sodium chloride, and 0.001% (w/v) poloxamer 188, yielding a TFF recovery flush pool. In some embodiments, the TFF load pool is concentrated by ultrafiltration to a viral concentration of about 5.0×10¹² vg/mL. In some embodiments, the diafiltration step comprises buffer exchange with a buffer comprising 10 mM sodium phosphate, 180 mM sodium chloride, and 0.001% (w/v) poloxamer 188 (buffer pH of 7.1-7.5, e.g., pH 7.3). In some embodiments, the final TFF load pool is filtered through an about 0.2 μm filter, yielding a filtered final TFF load pool. In some embodiments, the TFF recovery flush pool is filtered through an about 0.2 μm filter, yielding a filtered TFF recovery flush pool. In some embodiments, the filtered final TFF load pool and the filtered TFF recovery flush pool are combined to form a concentrated, buffer-exchanged pool, wherein the concentrated, buffer-exchanged pool is optionally diluted using a buffer comprising 10 mM sodium phosphate, 180 mM sodium chloride, and 0.001% (w/v) poloxamer 188 (buffer pH of 7.1-7.5, e.g., pH 7.3), wherein the concentrated, buffer-exchanged pool comprises a viral concentration of 2.0×10¹²-6.0×10¹² vg/mL, e.g., 5.0×10¹² vg/mL.

[0532] In some embodiments, the one or more VRF steps comprises filtration with a VRF filter having a pore size of about 35 nm, yielding a viral filtration pool. In some embodiments, the VRF filter is flushed twice before use with a solution comprising 10 mM sodium phosphate, 180 mM sodium chloride, and 0.001% poloxamer 188 (solution pH of 7.1-7.5, e.g., pH 7.3). In some embodiments, the viral filtration pool is filtered through a filter of about 0.2 μm. In some embodiments, the viral filtration pool comprises a viral concentration of 3.5×10¹²-5.0×10¹² vg/mL, e.g., about 5.0×10¹² vg/mL. In some embodiments, the viral filtration pool is filtered at least once (optionally at least twice) using an about 0.22 μm filter, yielding a filtered drug substance pool in a solution comprising 10 mM sodium phosphate, 180 mM sodium chloride, and 0.001% poloxamer 188 (solution pH of 7.1-7.5, e.g., pH 7.3).

[0533] In some embodiments, the filtered drug substance pool comprises a viral concentration of 3.0×10¹²-5.0×10¹² vg/mL, e.g., about 5.0×10¹² vg/mL. In some embodiments, the VRCs, at least one expressionBac or expressionBIIC, and at least one payloadBac or payloadBIIC are incubated for 156-180 hours, e.g., 164-172 hours, e.g., 168 hours, prior to lysis. In some embodiments, the VRCs incubating with at least one expressionBac (e.g., expressionBIIC) and at least one payloadBac (e.g., payloadBIIC) have at least 85% viability, e.g., at least 90% viability, prior to lysis. In some embodiments, the viral production pool weighs 195-198 kg, e.g., 196 kg, prior to lysis. In some embodiments, the method produces a total process rAAV yield of 30%-50%. In some embodiments, the rAAVs comprise a capsid from AAV2. In some embodiments, the AAV2 capsid is encoded by nucleic acid sequence comprising SEQ ID NO: 1778. In some embodiments, the AAV2 capsid comprises the amino acid sequence SEQ ID NO: 16.

[0534] In some embodiments, the viral expression construct comprises one or more polynucleotides encoding a VP1 capsid protein, VP2 capsid protein, VP3 capsid protein, Rep52, and Rep78. In some embodiments, the VP1 capsid protein, VP2 capsid protein, and VP3 capsid protein are encoded in one or more open reading frames and the Rep52 and Rep78 are encoded in one or more open reading frames, wherein the one or more open reading frames encoding the VP1 capsid protein, VP2 capsid protein, and VP3 capsid protein and the one or more open reading frames encoding the Rep52 and Rep78 are different open reading frames. In some embodiments, the VP1 capsid protein, VP2 capsid protein, and VP3 capsid protein are encoded in a first open reading frame and the Rep52 and Rep78 are encoded in a second open reading frame. In some embodiments, the VP1 protein is encoded by a sequence that is at least 99% identical to SEQ ID NO: 1778. In some embodiments, the VP1 protein is encoded by a sequence comprising SEQ ID NO: 1778. In some embodiments, the VP1 protein comprises an amino acid sequence of SEQ ID NO: 16. In some embodiments, the Rep78 protein is encoded by a sequence that is at least 99% identical to SEQ ID NO: 1779. In some embodiments, the Rep78 protein is encoded by a sequence comprising SEQ ID NO: 1779. This nucleic acid sequence encoding the Rep78 protein is given here:

(SEQ ID NO: 1779)
5’ctggcggggttttacgagattgtgattaaggtccccagcgaccttgacgagcatctgcccggcatttctgacagcttt
gtgaactgggtggccgagaaggagtgggagttgccgccagattctgacttggatctgaatctgattgagcaggcacccctgaccgtg
gccgagaagctgcagcgcgactttctgacggagtggcgccgtgtgagtaaggccccggaggcccttttctttgtgcaatttgagaagg
gagagagctacttccacttacacgtgctcgtggaaaccaccggggtgaaatccttagttttgggacgtttcctgagtcagattcgcgaaa
aactgattcagagaatttaccgcgggatcgagccgactttgccaaactggttcgcggtcacaaagaccagaaacggcgccggaggc
gggaacaaggtggtggacgagtgctacatccccaattacttgctccccaaaacccagcctgagctccagtgggcgtggactaatttag
aacagtatttaagcgcctgtttgaatctcacggagcgtaaacggttggtggcgcagcatctgacgcacgtgtcgcagacgcaggagca
gaacaaagagaatcagaatcccaattctgacgcgccggtgatcagatcaaaaacttcagccaggtacatggagctggtcgggtggct
cgtggacaaggggattacctcggagaagcagtggatccaggaggaccaggcctcatacatctccttcaatgcggcctccaactcgcg
gtcccaaatcaaggctgccttggacaatgcgggaaagattatgagcctgactaaaaccgcccccgactacctggtgggccagcagcc
cgtggaggacatttccagcaatcggatttataaaattttggaactaaacgggtacgatccccaatatgcggcttccgtctttctgggatgg
gccacgaaaaagttcggcaagaggaacaccatctggctgtttgggcctgcaactaccgggaagaccaacatcgcggaggccatagc
ccacactgtgcccttctacgggtgcgtaaactggaccaatgagaactttcccttcaacgactgtgtcgacaagatggtgatctggtggg
aggaggggaagatgaccgccaaggtcgtggagtcggccaaagccattctcggaggaagcaaggtgcgcgtggaccagaaatgca
agtcctcggcccagatagacccgactcccgtgatcgtcacctccaacaccaacatgtgcgccgtgattgacgggaactcaacgacctt
cgaacaccagcagccgttgcaagaccggatgttcaaatttgaactcacccgccgtctggatcatgactttgggaaggtcaccaagcag
gaagtcaaagactttttccggtgggcaaaggatcacgtggttgaggtggagcatgaattctacgtcaaaaagggtggagccaagaaa
agacccgcccccagtgacgcagatataagtgagcccaaacgggtgcgcgagtcagttgcgcagccatcgacgtcagacgcggaag
cttcgatcaactacgcagacaggtaccaaaacaaatgttctcgtcacgtgggcatgaatctgatgctgtttccctgcagacaatgcgaga
gaatgaatcagaattcaaatatctgcttcactcacggacagaaagactgtttagagtgctttcccgtgtcagaatctcaacccgtttctgtc
gtcaaaaaggcgtatcagaaactgtgctacattcatcatatcatgggaaaggtgccagacgcttgcactgcctgcgatctggtcaatgtg
gatttggatgactgcatctttgaacaataa 3’.

[0535] In some embodiments, the Rep78 protein comprises an amino acid sequence of SEQ ID NO: 1780. This amino acid sequence is given here:

(SEQ ID NO: 1780)
LAGFYEIVIKVPSDLDEHLPGISDSFVNWVAEKEWELPPDSDLDLNLIE
QAPLTVAEKLQRDFLTEWRRVSKAPEALFFVQFEKGESYFHLHVLVETT
GVKSLVLGRFLSQIREKLIQRIYRGIEPTLPNWFAVTKTRNGAGGGNKV
VDECYIPNYLLPKTQPELQWAWTNLEQYLSACLNLTERKRLVAQHLTHV
SQTQEQNKENQNPNSDAPVIRSKTSARYMELVGWLVDKGITSEKQWIQE
DQASYISFNAASNSRSQIKAALDNAGKIMSLTKTAPDYLVGQQPVEDIS
SNRIYKILELNGYDPQYAASVFLGWATKKFGKRNTIWLFGPATTGKTNI
AEAIAHTVPFYGCVNWTNENFPFNDCVDKMVIWWEEGKMTAKVVESAKA
ILGGSKVRVDQKCKSSAQIDPTPVIVTSNTNMCAVIDGNSTTFEHQQPL
QDRMFKFELTRRLDHDFGKVTKQEVKDFFRWAKDHVVEVEHEFYVKKGG
AKKRPAPSDADISEPKRVRESVAQPSTSDAEASINYADRYQNKCSRHVG
MNLMLFPCRQCERMNQNSNICFTHGQKDCLECFPVSESQPVSVVKKAYQ
KLCYIHHIMGKVPDACTACDLVNVDLDDCIFEQ.

[0536] In some embodiments, the first amino acid residue of the Rep78 protein is methionine. In some embodiments, the first amino acid residue of the Rep78 protein is leucine. In some embodiments, AAVs of the present disclosure comprise a mixed population of AAV2 Rep78 of SEQ ID NO: 1780, in which the first amino acid residue may be methionine or leucine.

[0537] In some embodiments, the ratio of VP1:VP2:VP3 of the rAAV produced by a method disclosed herein is about 1:1:10.

[0538] In certain embodiments, a composition comprising rAAVs comprising a polynucleotide encoding AADC or a functional variant thereof is produced by any of the methods disclosed herein. In some embodiments, the composition comprises 3.0×10¹²-5.0×10¹² vg/mL rAAVs, e.g., about 5.0×10¹² vg/mL rAAVs, in a solution comprising 10 mM sodium phosphate, 180 mM sodium chloride, and 0.001% poloxamer 188 (solution pH of 7.1-7.5, e.g., pH 7.3). In some embodiments, the composition is used in treating and/or preventing Parkinson's Disease. In some embodiments, the present disclosure comprises a method of treating Parkinson's Disease comprising administering an effective amount of the composition. In some embodiments, the composition is used for the manufacture of a medicament for treating and/or preventing Parkinson's Disease.

[0539] In certain embodiments, the present disclosure encompasses a method for producing a recombinant adeno-associated virus 2 (rAAV2) comprising a polynucleotide comprising SEQ ID NO: 979. In some embodiments, the method comprises the steps of: (a) culturing Sf9 cells (viral production Sf9 cells) in a bioreactor to a target cell density of 3.0×10⁶-3.4×10⁶ cells/mL; wherein the viral production Sf9 cells are cultured in serum-free, protein-free insect cell culture medium at about 26° C.-28° C. and 30%-50% dissolved oxygen, wherein the serum-free, protein-free insect cell culture medium optionally comprises L-glutamine and poloxamer 188; (b) introducing into the bioreactor baculovirus infected insect cells (expressionBIICs) comprising baculoviruses comprising a viral expression construct, and baculovirus infected insect cells (payloadBIICs) comprising baculoviruses comprising a payload construct, wherein the viral expression construct comprises one or more polynucleotides encoding capsid and replication proteins of adeno-associated virus 2 (AAV2); wherein the payload construct comprises SEQ ID NO: 979; and wherein the expressionBIICs are introduced at a ratio of about 1:300,000 expressionBIIC:viral production Sf9 (v/v) and the payloadBIICs are introduced at a ratio of about 1:100,000 payloadBIIC:viral production Sf9 (v/v), wherein the expressionBIICs are optionally Sf9 cells and the payloadBIICs are optionally Sf9 cells, wherein the viral expression construct comprises one or more polynucleotides encoding capsid and replication proteins of adeno-associated virus 2 (AAV2, e.g., wild-type AAV2); wherein the payload construct comprises SEQ ID NO: 979; (c) incubating the viral production Sf9 cells in the bioreactor under conditions that result in the production of one or more rAAV2s within one or more of the viral production Sf9 cells, wherein one or more of the rAAV2s comprise a polynucleotide comprising SEQ ID NO: 979; (d) harvesting a viral production pool from the bioreactor, wherein the viral production pool comprises one or more viral production Sf9 cells comprising one or more rAAV2s, wherein the viral production pool optionally weighs 195-198 kg, e.g., 196 kg, and has a % viability of at least 85%, e.g., at least 90%; (e) lysing the viral production Sf9 cells in the viral production pool, wherein the lysing comprises a chemical lysis solution and is carried out at 26° C.-28° C. for 4-6 hours, wherein the chemical lysis solution comprises 0.5% (w/v) octyl phenol ethoxylate and 200 mM arginine hydrochloride, and lacks detectable nuclease, thereby releasing one or more rAAV2s from the viral production Sf9 cells into a lysis medium; (f) clarifying the lysis medium of (e) through a depth filter followed by an about 0.2 μm filter, yielding a clarification pool; (g) processing the clarification pool of (f) through an immunoaffinity chromatography column comprising a recombinant protein ligand that binds at least AAV2; wherein the immunoaffinity chromatography column is equilibrated with a solution comprising 50 mM sodium phosphate, 350 mM sodium chloride and 0.001% w/v poloxamer 188; loaded with a 1.0×10¹³-5.0×10¹³ vg/mL-r load challenge at 18-25° C.; flushed with a solution comprising 50 mM sodium phosphate, 350 mM sodium chloride and 0.001% w/v poloxamer 188; washed with a solution comprising 20 mM sodium citrate, 1 M sodium chloride and 0.001% w/v poloxamer 188; and washed with a solution of 10 mM sodium citrate, 350 mM sodium chloride and 0.001% w/v poloxamer 188; wherein processing the clarification pool of (f) through an immunoaffinity chromatography column yields an immunoaffinity chromatography pool, wherein the immunoaffinity chromatography pool is optionally neutralized with 2 M Tris Base and 0.001% w/v poloxamer 188 (3.0% v/v spike, pH 8.0-8.5) and optionally filtered through an about 0.2 μm filter; (h) processing the immunoaffinity chromatography pool or filtered immunoaffinity chromatography pool of (g) through an anion exchange chromatography column, e.g., a column operated in flow-through mode; wherein the one or more anion exchange chromatography columns is charged and equilibrated with a solution comprising 20 mM Tris, 2 M sodium chloride and 0.001% w/v poloxamer 188, then a solution of 40 mM Tris, 170 mM sodium chloride and 0.001% w/v poloxamer 188; loaded with a 1.0×10¹³-5.0×10¹³ vg/mL-r load challenge at 18-25° C.; and flushed and eluted with a solution comprising 40 mM Tris, 170 mM sodium chloride and 0.001% w/v poloxamer 188, yielding an anion exchange chromatography pool; wherein the anion exchange chromatography pool is filtered through an about 0.2 μm filter, yielding a filtered anion exchange chromatography pool; (i) processing the filtered anion exchange chromatography pool of (h) through a tangential flow filtration (TFF) filter yielding a TFF load pool; wherein the TFF filter is equilibrated with buffer comprising 40 mM Tris, 170 mM sodium chloride, and 0.001% (w/v) poloxamer 188; wherein the TFF load pool is concentrated by ultrafiltration to a viral concentration of about 5.0×10¹² vg/mL, followed by diafiltration comprising buffer exchange with a buffer comprising 10 mM sodium phosphate, 180 mM sodium chloride, and 0.001% (w/v) poloxamer 188 (buffer pH of 7.1-7.5, e.g., pH 7.3), followed by filtration through an about 0.2 μm filter, yielding a filtered TFF load pool; wherein a TFF recovery flush pool is prepared by subjecting the TFF filter to a recovery flush using a buffer comprising 10 mM sodium phosphate, 180 mM sodium chloride, and 0.001% (w/v) poloxamer 188 (buffer pH of 7.1-7.5, e.g., pH 7.3); wherein the TFF recovery flush pool is filtered through an about 0.2 μm filter, yielding a filtered TFF recovery flush pool; wherein the filtered TFF load pool and filtered TFF recovery flush pool are combined to form a concentrated, buffer-exchanged pool, and optionally diluted using a buffer comprising 10 mM sodium phosphate, 180 mM sodium chloride, and 0.001% (w/v) poloxamer 188 (buffer pH of 7.1-7.5, e.g., pH 7.3), wherein the concentrated, buffer-exchanged pool comprises a viral concentration of 2.0×10¹²-6.0×10¹² vg/mL; (j) processing the concentrated, buffer-exchanged pool of (i) through a viral retentive filtration (VRF) filter to yield a viral filtration pool; wherein the VRF filter comprises a pore size of about 35 nm and is flushed twice before use with a solution comprising 10 mM sodium phosphate, 180 mM sodium chloride, and 0.001% poloxamer 188 (solution pH of 7.1-7.5, e.g., pH 7.3); and wherein the viral filtration pool is filtered through a filter of about 0.2 μm, yielding a filtered viral filtration pool comprising a viral concentration of 3.5×10¹²-5.0×10¹² vg/mL; and (k) processing the viral production pool of (j) through an about 0.22 μm filter, e.g., filtering twice through an about 0.22 μm filter, to yield a purified rAAV2 composition comprising a viral concentration of 3.0×10¹²-5.0×10¹² vg/mL in a solution comprising 10 mM sodium phosphate, 180 mM sodium chloride, and 0.001% poloxamer 188 (solution pH of 7.1-7.5, e.g., pH 7.3).

[0540] In some embodiments, the viral concentration of the purified rAAV2 composition is about 5.0×10¹² vg/mL. In some embodiments, the method produces a total process rAAV yield of 30%-50%. In some embodiments, the viral expression construct comprises one or more polynucleotides encoding a VP1 capsid protein, VP2 capsid protein, VP3 capsid protein, Rep52, and Rep78. In some embodiments, the VP1 capsid protein, VP2 capsid protein, and VP3 capsid protein are encoded in one or more open reading frames and the Rep52 and Rep78 are encoded in one or more open reading frames, wherein the one or more open reading frames encoding the VP1 capsid protein, VP2 capsid protein, and VP3 capsid protein and the one or more open reading frames encoding the Rep52 and Rep78 are different open reading frames. In some embodiments, the VP1 capsid protein, VP2 capsid protein, and VP3 capsid protein are encoded in a first open reading frame and the Rep52 and Rep78 are encoded in a second open reading frame. In some embodiments, the purified rAAV2 comprise a ratio of VP1:VP2:VP3 of about 1:1:10.

[0541] In some embodiments, a composition produced by any of the methods disclosed herein comprises 3.0×10¹²-5.0×10¹² vg/mL rAAV2s, e.g., about 5.0×10¹² vg/mL rAAV2s, in a solution comprising 10 mM sodium phosphate, 180 mM sodium chloride, and 0.001% poloxamer 188 (solution pH of 7.1-7.5, e.g., pH 7.3). In some embodiments, the composition is used in treating and/or preventing Parkinson's Disease. In some embodiments, a method of treating Parkinson's Disease comprises administering an effective amount of the composition. In some embodiments, the composition is used in the manufacture of a medicament for treating and/or preventing Parkinson's Disease.

[0542] In some embodiments, the purified viral rAAV2 composition is formulated at a concentration of about 3.0×10¹² to about 5.0×10¹² vg/mL, e.g., about 5.0×10¹² vg/mL. In some embodiments, the purified rAAV2 composition is formulated a concentration of about 2.0×10¹² to about 3.0×10¹² vg/mL, e.g., about 2.7×10¹² vg/mL.

[0543] In some embodiments, the purified viral rAAV2 composition is formulated at a concentration of about 5×10¹² vg/mL in a solution comprising about 10 mM sodium phosphate, about 180 mM sodium chloride, about 0.001% poloxamer 188 (solution pH of about 7.3).

[0544] In some embodiments, the purified viral rAAV2 composition comprises a polynucleotide encoding AADC (e.g., SEQ ID NO: 979) or a functional variant thereof in an AAV2 viral capsid (e.g., SEQ ID NO: 15) and has an AADC relative potency of at least 50%, wherein the rAAV composition comprises greater than or equal to 3.0×10¹² vg/mL (e.g., about 5.0×10¹² vg/mL) rAAVs in a solution comprising 10 mM sodium phosphate, 180 mM sodium chloride, and 0.001% poloxamer (solution pH of 7.3±0.5). In some embodiments, the rAAV composition comprises greater than about 60% full viral capsids (e.g., less than about 40% empty viral capsids), less than about 1 EU/mL endotoxin levels, greater than about 90% protein purity, and greater than about 3×10¹⁰ TU/mL infectious titer. In some embodiments, the rAAV composition has an osmolality of 300-400 mOsm/kg, and comprises less than about 6000 particles with a size of ≥10 μm and less than about 600 particles with a size of ≥25 μm.

### III. Compositions and Formulations

### General

[0545] Gene therapy drug products (such as rAAV particles) are challenging to incorporate into composition and formulations due to their limited stability in the liquid state and a high propensity for large-scale aggregation at low concentrations. Gene therapy drug products are often delivered directly to treatment areas (comprising CNS tissue); which requires that excipients and formulation parameters be compatible with tissue function, microenvironment, and volume restrictions.

[0546] According to the present disclosure, AAV particles may be prepared as, or comprised in, pharmaceutical compositions. It will be understood that such compositions necessarily comprise one or more active ingredients and, most often, one or more pharmaceutically acceptable excipients.

[0547] Relative amounts of the active ingredient (e.g., AAV particle), a pharmaceutically acceptable excipient, and/or any additional ingredients in a pharmaceutical composition in accordance with the present disclosure may vary, depending upon the identity, size, and/or condition of the subject being treated and further depending upon the route by which the composition is to be administered. For example, the composition may comprise between 0.1% and 99% (w/w) of the active ingredient. By way of example, the composition may comprise between 0.1% and 100%, e.g., between 0.5 and 50%, between 1-30%, between 5-80%, or at least 80% (w/w) active ingredient.

[0548] In certain embodiments, the AAV particle pharmaceutical compositions described herein may comprise at least one payload of the present disclosure. As a non-limiting example, the pharmaceutical compositions may contain an AAV particle with 1, 2, 3, 4 or 5 payloads.

[0549] Although the descriptions of pharmaceutical compositions provided herein are principally directed to pharmaceutical compositions which are suitable for administration to humans, it will be understood by the skilled artisan that such compositions are generally suitable for administration to any other animal, e.g., to non-human animals, e.g., non-human mammals. Modification of pharmaceutical compositions suitable for administration to humans in order to render the compositions suitable for administration to various animals is well understood, and the ordinarily skilled veterinary pharmacologist can design and/or perform such modification with merely ordinary, if any, experimentation. Subjects to which administration of the pharmaceutical compositions is contemplated comprise, but are not limited to, humans and/or other primates; mammals, comprising commercially relevant mammals such as cattle, pigs, horses, sheep, cats, dogs, mice, rats, birds, comprising commercially relevant birds such as poultry, chickens, ducks, geese, and/or turkeys.

[0550] In certain embodiments, compositions are administered to humans, human patients or subjects.

[0551] Formulations of the present disclosure can comprise, without limitation, saline, liposomes, lipid nanoparticles, polymers, peptides, proteins, cells transfected with AAV particles (e.g., for transfer or transplantation into a subject) and combinations thereof.

[0552] Formulations of the pharmaceutical compositions described herein may be prepared by any method known or hereafter developed in the art of pharmacology. As used herein the term “pharmaceutical composition” refers to compositions comprising at least one active ingredient and optionally one or more pharmaceutically acceptable excipients.

[0553] In general, such preparatory methods comprise the step of associating the active ingredient with an excipient and/or one or more other accessory ingredients. As used herein, the phrase “active ingredient” generally refers either to an AAV particle carrying a payload region encoding the polynucleotide or polypeptides of the present disclosure or to the end product encoded by a viral genome of an AAV particle as described herein.

[0554] In certain embodiments, the formulations may comprise at least one inactive ingredient. As used herein, the term “inactive ingredient” refers to one or more inactive agents comprised in formulations. In certain embodiments, all, none or some of the inactive ingredients which may be used in the formulations of the present disclosure may be approved by the US Food and Drug Administration (FDA).

[0555] Formulations of the AAV particles and pharmaceutical compositions described herein may be prepared by any method known or hereafter developed in the art of pharmacology. In general, such preparatory methods comprise the step of bringing the active ingredient into association with an excipient and/or one or more other accessory ingredients, and then, if necessary and/or desirable, dividing, shaping and/or packaging the product into a desired single- or multi-dose unit.

[0556] A pharmaceutical composition in accordance with the present disclosure may be prepared, packaged, and/or sold in bulk, as a single unit dose, and/or as a plurality of single unit doses. As used herein, a “unit dose” refers to a discrete amount of the pharmaceutical composition comprising a predetermined amount of the active ingredient. The amount of the active ingredient is generally equal to the dosage of the active ingredient which would be administered to a subject and/or a convenient fraction of such a dosage such as, for example, one-half or one-third of such a dosage.

[0557] In certain embodiments, formulations of the present disclosure are aqueous formulations (i.e. formulations which comprise water). In certain embodiments, formulations of the present disclosure comprise water, sanitized water, or Water-for-injection (WFI).

[0558] In certain embodiments, the AAV particles of the present disclosure may be formulated in PBS with 0.001%-0.1% (w/v) of Poloxamer 188 (e.g., Pluronic F-68) at a pH of about 7.0.

[0559] In certain embodiments, the AAV formulations described herein may contain sufficient AAV particles for expression of at least one expressed functional payload. As a non-limiting example, the AAV particles may contain viral genomes encoding 1, 2, 3, 4 or 5 functional payloads.

[0560] According to the present disclosure AAV particles may be formulated for CNS delivery. Agents that cross the brain blood barrier may be used. For example, some cell penetrating peptides that can target molecules to the brain blood barrier endothelium may be used for formulation (e.g., Mathupala, Expert Opin Ther Pat., 2009, 19, 137-140; the content of which is incorporated herein by reference in its entirety).

[0561] In certain embodiments, the AAV formulations described herein may comprise a buffering system which comprises phosphate, Tris, and/or Histidine. The buffering agents of phosphate, Tris, and/or Histidine may be independently used in the formulation in a range of 2-12 mM.

[0562] Formulations of the present disclosure can be used in any step of producing, processing, preparing, storing, expanding, or administering AAV particles and viral vectors of the present disclosure. In certain embodiments, pharmaceutical formulations and components can be use in AAV production, AAV processing, AAV clarification, AAV purification, and AAV finishing systems of the present disclosure, all of which can be pre-rinsed, packed, equilibrated, flushed, processed, eluted, washed or cleaned with formulations known to those in the art, comprising AAV pharmaceutical, processing and storage formulations of the present disclosure.

### Excipients and Diluents

[0563] The AAV particles of the present disclosure can be formulated into a pharmaceutical composition which comprises one or more excipients or diluents to (1) increase stability; (2) increase cell transfection or transduction; (3) permit the sustained or delayed release of the payload; (4) alter the biodistribution (e.g., target the viral particle to specific tissues or cell types); (5) increase the translation of encoded protein; (6) alter the release profile of encoded protein and/or (7) allow for regulatable expression of the payload of the present disclosure.

[0564] Relative amounts of the active ingredient (e.g., AAV particle), the pharmaceutically acceptable excipient, and/or any additional ingredients in a pharmaceutical composition in accordance with the present disclosure may vary, depending upon the identity, size, and/or condition of the subject being treated and further depending upon the route by which the composition is to be administered. In certain embodiments, the composition may comprise between 0.001% and 99% (w/w) of the active ingredient. By way of example, the composition may comprise between 0.001% and 100%, e.g., between 0.5 and 50%, between 1-30%, between 5-80%, or at least 80% (w/w) active ingredient. In certain embodiments, the composition may comprise between 0.001% and 99% (w/w) of the excipients and diluents. By way of example, the composition may comprise between 0.001% and 100%, e.g., between 0.5 and 50%, between 1-30%, between 5-80%, or at least 80% (w/w) excipients and diluents.

[0565] In certain embodiments, a pharmaceutically acceptable excipient may be at least 95%, at least 96%, at least 97%, at least 98%, at least 99%, or 100% pure. In certain embodiments, an excipient is approved for use for humans and for veterinary use. In certain embodiments, an excipient may be approved by United States Food and Drug Administration. In certain embodiments, an excipient may be of pharmaceutical grade. In certain embodiments, an excipient may meet the standards of the United States Pharmacopoeia (USP), the European Pharmacopoeia (EP), the British Pharmacopoeia, and/or the International Pharmacopoeia.

[0566] Excipients, as used herein, comprise, but are not limited to, any and all solvents, dispersion media, diluents, or other liquid vehicles, dispersion or suspension aids, surface active agents, isotonic agents, thickening or emulsifying agents, preservatives, and the like, as suited to the particular dosage form desired. Various excipients for formulating pharmaceutical compositions and techniques for preparing the composition are known in the art (see Remington: The Science and Practice of Pharmacy, 21st Edition, A. R. Gennaro, Lippincott, Williams & Wilkins, Baltimore, Md., 2006; incorporated herein by reference in its entirety). The use of a conventional excipient medium may be contemplated within the scope of the present disclosure, except insofar as any conventional excipient medium may be incompatible with a substance or its derivatives, such as by producing any undesirable biological effect or otherwise interacting in a deleterious manner with any other component(s) of the pharmaceutical composition.

[0567] Exemplary excipients and diluents which can be comprised in formulations of the present disclosure comprise, but are not limited to, calcium carbonate, sodium carbonate, calcium phosphate, dicalcium phosphate, calcium sulfate, calcium hydrogen phosphate, sodium phosphate lactose, sucrose, cellulose, microcrystalline cellulose, kaolin, mannitol, sorbitol, inositol, sodium chloride, dry starch, cornstarch, powdered sugar, etc., and/or combinations thereof.

[0568] Pharmaceutical formulations of AAV particles disclosed herein may comprise cations or anions. In certain embodiments, the formulations comprise metal cations such as, but not limited to, Zn²⁺, Ca²⁺, Cu²⁺, Mn²⁺, Mg⁺ and combinations thereof. As a non-limiting example, formulations may comprise polymers and complexes with a metal cation (See e.g., U.S. Pat. Nos. 6,265,389 and 6,555,525, each of which is herein incorporated by reference in its entirety).

[0569] Formulations of the present disclosure may also comprise one or more pharmaceutically acceptable salts. As used herein, “pharmaceutically acceptable salts” refers to derivatives of the disclosed compounds wherein the parent compound is modified by converting an existing acid or base moiety to its salt form (e.g., by reacting the free base group with a suitable organic acid).

[0570] In certain embodiments, additional excipients that may be used in formulating the pharmaceutical composition may comprise magnesium chloride (MgCl₂), arginine, sorbitol, and/or trehalose.

[0571] Formulations of the present disclosure may comprise at least one excipient and/or diluent in addition to the AAV particle. The formulation may comprise 1, 2, 3, 4, 5, 6, 7, 8, 9, 10, or more than 10 excipients and/or diluents in addition to the AAV particle.

[0572] In certain embodiments, the formulation may comprise, but is not limited to, phosphate-buffered saline (PBS). As a non-limiting example, the PBS may comprise sodium chloride, potassium chloride, disodium phosphate, monopotassium phosphate, and distilled water. In some instances, the PBS does not contain potassium or magnesium. In other instances, the PBS contains calcium and magnesium.

### Sodium Phosphate

[0573] In certain embodiments, at least one of the components in the formulation is sodium phosphate. The formulation may comprise monobasic, dibasic or a combination of both monobasic and dibasic sodium phosphate.

[0574] In certain embodiments, the concentration of sodium phosphate in a formulation may be, but is not limited to, 0.1 mM, 0.2 mM, 0.3 mM, 0.4 mM, 0.5 mM, 0.6 mM, 0.7 mM, 0.8 mM, 0.9 mM, 1 mM, 1.1 mM, 1.2 mM, 1.3 mM, 1.4 mM, 1.5 mM, 1.6 mM, 1.7 mM, 1.8 mM, 1.9 mM, 2 mM, 2.1 mM, 2.2 mM, 2.3 mM, 2.4 mM, 2.5 mM, 2.6 mM, 2.7 mM, 2.8 mM, 2.9 mM, 3 mM, 3.1 mM, 3.2 mM, 3.3 mM, 3.4 mM, 3.5 mM, 3.6 mM, 3.7 mM, 3.8 mM, 3.9 mM, 4 mM, 4.1 mM, 4.2 mM, 4.3 mM, 4.4 mM, 4.5 mM, 4.6 mM, 4.7 mM, 4.8 mM, 4.9 mM, 5 mM, 5.1 mM, 5.2 mM, 5.3 mM, 5.4 mM, 5.5 mM, 5.6 mM, 5.7 mM, 5.8 mM, 5.9 mM, 6 mM, 6.1 mM, 6.2 mM, 6.3 mM, 6.4 mM, 6.5 mM, 6.6 mM, 6.7 mM, 6.8 mM, 6.9 mM, 7 mM, 7.1 mM, 7.2 mM, 7.3 mM, 7.4 mM, 7.5 mM, 7.6 mM, 7.7 mM, 7.8 mM, 7.9 mM, 8 mM, 8.1 mM, 8.2 mM, 8.3 mM, 8.4 mM, 8.5 mM, 8.6 mM, 8.7 mM, 8.8 mM, 8.9 mM, 9 mM, 9.1 mM, 9.2 mM, 9.3 mM, 9.4 mM, 9.5 mM, 9.6 mM, 9.7 mM, 9.8 mM, 9.9 mM, 10 mM, 10.1 mM, 10.2 mM, 10.3 mM, 10.4 mM, 10.5 mM, 10.6 mM, 10.7 mM, 10.8 mM, 10.9 mM, 11 mM, 11.1 mM, 11.2 mM, 11.3 mM, 11.4 mM, 11.5 mM, 11.6 mM, 11.7 mM, 11.8 mM, 11.9 mM, 12 mM, 12.1 mM, 12.2 mM, 12.3 mM, 12.4 mM, 12.5 mM, 12.6 mM, 12.7 mM, 12.8 mM, 12.9 mM, 13 mM, 13.1 mM, 13.2 mM, 13.3 mM, 13.4 mM, 13.5 mM, 13.6 mM, 13.7 mM, 13.8 mM, 13.9 mM, 14 mM, 14.1 mM, 14.2 mM, 14.3 mM, 14.4 mM, 14.5 mM, 14.6 mM, 14.7 mM, 14.8 mM, 14.9 mM or 15 mM.

[0575] The formulation may comprise sodium phosphate in a range of 0-0.5 mM, 0.1-0.6 mM, 0.2-0.7 mM, 0.3-0.8 mM, 0.4-0.9 mM, 0.5-1 mM, 0.6-1.1 mM, 0.7-1.2 mM, 0.8-1.3 mM, 0.9-1.4 mM, 1-1.5 mM, 1.1-1.6 mM, 1.2-1.7 mM, 1.3-1.8 mM, 1.4-1.9 mM, 1.5-2 mM, 1.6-2.1 mM, 1.7-2.2 mM, 1.8-2.3 mM, 1.9-2.4 mM, 2-2.5 mM, 2.1-2.6 mM, 2.2-2.7 mM, 2.3-2.8 mM, 2.4-2.9 mM, 2.5-3 mM, 2.6-3.1 mM, 2.7-3.2 mM, 2.8-3.3 mM, 2.9-3.4 mM, 3-3.5 mM, 3.1-3.6 mM, 3.2-3.7 mM, 3.3-3.8 mM, 3.4-3.9 mM, 3.5-4 mM, 3.6-4.1 mM, 3.7-4.2 mM, 3.8-4.3 mM, 3.9-4.4 mM, 4-4.5 mM, 4.1-4.6 mM, 4.2-4.7 mM, 4.3-4.8 mM, 4.4-4.9 mM, 4.5-5 mM, 4.6-5.1 mM, 4.7-5.2 mM, 4.8-5.3 mM, 4.9-5.4 mM, 5-5.5 mM, 5.1-5.6 mM, 5.2-5.7 mM, 5.3-5.8 mM, 5.4-5.9 mM, 5.5-6 mM, 5.6-6.1 mM, 5.7-6.2 mM, 5.8-6.3 mM, 5.9-6.4 mM, 6-6.5 mM, 6.1-6.6 mM, 6.2-6.7 mM, 6.3-6.8 mM, 6.4-6.9 mM, 6.5-7 mM, 6.6-7.1 mM, 6.7-7.2 mM, 6.8-7.3 mM, 6.9-7.4 mM, 7-7.5 mM, 7.1-7.6 mM, 7.2-7.7 mM, 7.3-7.8 mM, 7.4-7.9 mM, 7.5-8 mM, 7.6-8.1 mM, 7.7-8.2 mM, 7.8-8.3 mM, 7.9-8.4 mM, 8-8.5 mM, 8.1-8.6 mM, 8.2-8.7 mM, 8.3-8.8 mM, 8.4-8.9 mM, 8.5-9 mM, 8.6-9.1 mM, 8.7-9.2 mM, 8.8-9.3 mM, 8.9-9.4 mM, 9-9.5 mM, 9.1-9.6 mM, 9.2-9.7 mM, 9.3-9.8 mM, 9.4-9.9 mM, 9.5-10 mM, 9.6-10.1 mM, 9.7-10.2 mM, 9.8-10.3 mM, 9.9-10.4 mM, 10-10.5 mM, 10.1-10.6 mM, 10.2-10.7 mM, 10.3-10.8 mM, 10.4-10.9 mM, 10.5-11 mM, 10.6-11.1 mM, 10.7-11.2 mM, 10.8-11.3 mM, 10.9-11.4 mM, 11-11.5 mM, 11.1-11.6 mM, 11.2-11.7 mM, 11.3-11.8 mM, 11.4-11.9 mM, 11.5-12 mM, 11.6-12.1 mM, 11.7-12.2 mM, 11.8-12.3 mM, 11.9-12.4 mM, 12-12.5 mM, 12.1-12.6 mM, 12.2-12.7 mM, 12.3-12.8 mM, 12.4-12.9 mM, 12.5-13 mM, 12.6-13.1 mM, 12.7-13.2 mM, 12.8-13.3 mM, 12.9-13.4 mM, 13-13.5 mM, 13.1-13.6 mM, 13.2-13.7 mM, 13.3-13.8 mM, 13.4-13.9 mM, 13.5-14 mM, 13.6-14.1 mM, 13.7-14.2 mM, 13.8-14.3 mM, 13.9-14.4 mM, 14-14.5 mM, 14.1-14.6 mM, 14.2-14.7 mM, 14.3-14.8 mM, 14.4-14.9 mM, 14.5-15 mM, 0-1 mM, 1-2 mM, 2-3 mM, 3-4 mM, 4-5 mM, 5-6 mM, 6-7 mM, 7-8 mM, 8-9 mM, 9-10 mM, 10-11 mM, 11-12 mM, 12-13 mM, 13-14 mM, 14-15 mM, 15-16 mM, 0-2 mM, 1-3 mM, 2-4 mM, 3-5 mM, 4-6 mM, 5-7 mM, 6-8 mM, 7-9 mM, 8-10 mM, 9-11 mM, 10-12 mM, 11-13 mM, 12-14 mM, 13-15 mM, 0-3 mM, 1-4 mM, 2-5 mM, 3-6 mM, 4-7 mM, 5-8 mM, 6-9 mM, 7-10 mM, 8-11 mM, 9-12 mM, 10-13 mM, 11-14 mM, 12-15 mM, 0-4 mM, 1-5 mM, 2-6 mM, 3-7 mM, 4-8 mM, 5-9 mM, 6-10 mM, 7-11 mM, 8-12 mM, 9-13 mM, 10-14 mM, 11-15 mM, 0-5 mM, 1-6 mM, 2-7 mM, 3-8 mM, 4-9 mM, 5-10 mM, 6-11 mM, 7-12 mM, 8-13 mM, 9-14 mM, 10-15 mM, 0-6 mM, 1-7 mM, 2-8 mM, 3-9 mM, 4-10 mM, 5-11 mM, 6-12 mM, 7-13 mM, 8-14 mM, 9-15 mM, 0-7 mM, 1-8 mM, 2-9 mM, 3-10 mM, 4-11 mM, 5-12 mM, 6-13 mM, 7-14 mM, 8-15 mM, 0-8 mM, 1-9 mM, 2-10 mM, 3-11 mM, 4-12 mM, 5-13 mM, 6-14 mM, 7-15 mM, 0-9 mM, 1-10 mM, 2-11 mM, 3-12 mM, 4-13 mM, 5-14 mM, 6-15 mM, 0-10 mM, 1-11 mM, 2-12 mM, 3-13 mM, 4-14 mM, 5-15 mM, 0-11 mM, 1-12 mM, 2-13 mM, 3-14 mM, 4-15 mM, 0-12 mM, 1-13 mM, 2-14 mM, 3-15 mM, 0-13 mM, 1-14 mM, 2-15 mM, 0-14 mM, 1-15 mM, or 0-15 mM.

[0576] In certain embodiments, the formulation may comprise 2-12 mM of sodium phosphate.

[0577] In certain embodiments, the formulation may comprise 10 mM of sodium phosphate.

### Potassium Phosphate

[0578] In certain embodiments, at least one of the components in the formulation is potassium phosphate. The formulation may comprise monobasic, dibasic or a combination of both monobasic and dibasic potassium phosphate.

[0579] In certain embodiments, the concentration of potassium phosphate in a formulation may be, but is not limited to, 0.1 mM, 0.2 mM, 0.3 mM, 0.4 mM, 0.5 mM, 0.6 mM, 0.7 mM, 0.8 mM, 0.9 mM, 1 mM, 1.1 mM, 1.2 mM, 1.3 mM, 1.4 mM, 1.5 mM, 1.6 mM, 1.7 mM, 1.8 mM, 1.9 mM, 2 mM, 2.1 mM, 2.2 mM, 2.3 mM, 2.4 mM, 2.5 mM, 2.6 mM, 2.7 mM, 2.8 mM, 2.9 mM, 3 mM, 3.1 mM, 3.2 mM, 3.3 mM, 3.4 mM, 3.5 mM, 3.6 mM, 3.7 mM, 3.8 mM, 3.9 mM, 4 mM, 4.1 mM, 4.2 mM, 4.3 mM, 4.4 mM, 4.5 mM, 4.6 mM, 4.7 mM, 4.8 mM, 4.9 mM, 5 mM, 5.1 mM, 5.2 mM, 5.3 mM, 5.4 mM, 5.5 mM, 5.6 mM, 5.7 mM, 5.8 mM, 5.9 mM, 6 mM, 6.1 mM, 6.2 mM, 6.3 mM, 6.4 mM, 6.5 mM, 6.6 mM, 6.7 mM, 6.8 mM, 6.9 mM, 7 mM, 7.1 mM, 7.2 mM, 7.3 mM, 7.4 mM, 7.5 mM, 7.6 mM, 7.7 mM, 7.8 mM, 7.9 mM, 8 mM, 8.1 mM, 8.2 mM, 8.3 mM, 8.4 mM, 8.5 mM, 8.6 mM, 8.7 mM, 8.8 mM, 8.9 mM, 9 mM, 9.1 mM, 9.2 mM, 9.3 mM, 9.4 mM, 9.5 mM, 9.6 mM, 9.7 mM, 9.8 mM, 9.9 mM, 10 mM, 10.1 mM, 10.2 mM, 10.3 mM, 10.4 mM, 10.5 mM, 10.6 mM, 10.7 mM, 10.8 mM, 10.9 mM, 11 mM, 11.1 mM, 11.2 mM, 11.3 mM, 11.4 mM, 11.5 mM, 11.6 mM, 11.7 mM, 11.8 mM, 11.9 mM, 12 mM, 12.1 mM, 12.2 mM, 12.3 mM, 12.4 mM, 12.5 mM, 12.6 mM, 12.7 mM, 12.8 mM, 12.9 mM, 13 mM, 13.1 mM, 13.2 mM, 13.3 mM, 13.4 mM, 13.5 mM, 13.6 mM, 13.7 mM, 13.8 mM, 13.9 mM, 14 mM, 14.1 mM, 14.2 mM, 14.3 mM, 14.4 mM, 14.5 mM, 14.6 mM, 14.7 mM, 14.8 mM, 14.9 mM or 15 mM.

[0580] The formulation may comprise potassium phosphate in a range of 0-0.5 mM, 0.1-0.6 mM, 0.2-0.7 mM, 0.3-0.8 mM, 0.4-0.9 mM, 0.5-1 mM, 0.6-1.1 mM, 0.7-1.2 mM, 0.8-1.3 mM, 0.9-1.4 mM, 1-1.5 mM, 1.1-1.6 mM, 1.2-1.7 mM, 1.3-1.8 mM, 1.4-1.9 mM, 1.5-2 mM, 1.6-2.1 mM, 1.7-2.2 mM, 1.8-2.3 mM, 1.9-2.4 mM, 2-2.5 mM, 2.1-2.6 mM, 2.2-2.7 mM, 2.3-2.8 mM, 2.4-2.9 mM, 2.5-3 mM, 2.6-3.1 mM, 2.7-3.2 mM, 2.8-3.3 mM, 2.9-3.4 mM, 3-3.5 mM, 3.1-3.6 mM, 3.2-3.7 mM, 3.3-3.8 mM, 3.4-3.9 mM, 3.5-4 mM, 3.6-4.1 mM, 3.7-4.2 mM, 3.8-4.3 mM, 3.9-4.4 mM, 4-4.5 mM, 4.1-4.6 mM, 4.2-4.7 mM, 4.3-4.8 mM, 4.4-4.9 mM, 4.5-5 mM, 4.6-5.1 mM, 4.7-5.2 mM, 4.8-5.3 mM, 4.9-5.4 mM, 5-5.5 mM, 5.1-5.6 mM, 5.2-5.7 mM, 5.3-5.8 mM, 5.4-5.9 mM, 5.5-6 mM, 5.6-6.1 mM, 5.7-6.2 mM, 5.8-6.3 mM, 5.9-6.4 mM, 6-6.5 mM, 6.1-6.6 mM, 6.2-6.7 mM, 6.3-6.8 mM, 6.4-6.9 mM, 6.5-7 mM, 6.6-7.1 mM, 6.7-7.2 mM, 6.8-7.3 mM, 6.9-7.4 mM, 7-7.5 mM, 7.1-7.6 mM, 7.2-7.7 mM, 7.3-7.8 mM, 7.4-7.9 mM, 7.5-8 mM, 7.6-8.1 mM, 7.7-8.2 mM, 7.8-8.3 mM, 7.9-8.4 mM, 8-8.5 mM, 8.1-8.6 mM, 8.2-8.7 mM, 8.3-8.8 mM, 8.4-8.9 mM, 8.5-9 mM, 8.6-9.1 mM, 8.7-9.2 mM, 8.8-9.3 mM, 8.9-9.4 mM, 9-9.5 mM, 9.1-9.6 mM, 9.2-9.7 mM, 9.3-9.8 mM, 9.4-9.9 mM, 9.5-10 mM, 9.6-10.1 mM, 9.7-10.2 mM, 9.8-10.3 mM, 9.9-10.4 mM, 10-10.5 mM, 10.1-10.6 mM, 10.2-10.7 mM, 10.3-10.8 mM, 10.4-10.9 mM, 10.5-11 mM, 10.6-11.1 mM, 10.7-11.2 mM, 10.8-11.3 mM, 10.9-11.4 mM, 11-11.5 mM, 11.1-11.6 mM, 11.2-11.7 mM, 11.3-11.8 mM, 11.4-11.9 mM, 11.5-12 mM, 11.6-12.1 mM, 11.7-12.2 mM, 11.8-12.3 mM, 11.9-12.4 mM, 12-12.5 mM, 12.1-12.6 mM, 12.2-12.7 mM, 12.3-12.8 mM, 12.4-12.9 mM, 12.5-13 mM, 12.6-13.1 mM, 12.7-13.2 mM, 12.8-13.3 mM, 12.9-13.4 mM, 13-13.5 mM, 13.1-13.6 mM, 13.2-13.7 mM, 13.3-13.8 mM, 13.4-13.9 mM, 13.5-14 mM, 13.6-14.1 mM, 13.7-14.2 mM, 13.8-14.3 mM, 13.9-14.4 mM, 14-14.5 mM, 14.1-14.6 mM, 14.2-14.7 mM, 14.3-14.8 mM, 14.4-14.9 mM, 14.5-15 mM, 0-1 mM, 1-2 mM, 2-3 mM, 3-4 mM, 4-5 mM, 5-6 mM, 6-7 mM, 7-8 mM, 8-9 mM, 9-10 mM, 10-11 mM, 11-12 mM, 12-13 mM, 13-14 mM, 14-15 mM, 15-16 mM, 0-2 mM, 1-3 mM, 2-4 mM, 3-5 mM, 4-6 mM, 5-7 mM, 6-8 mM, 7-9 mM, 8-10 mM, 9-11 mM, 10-12 mM, 11-13 mM, 12-14 mM, 13-15 mM, 0-3 mM, 1-4 mM, 2-5 mM, 3-6 mM, 4-7 mM, 5-8 mM, 6-9 mM, 7-10 mM, 8-11 mM, 9-12 mM, 10-13 mM, 11-14 mM, 12-15 mM, 0-4 mM, 1-5 mM, 2-6 mM, 3-7 mM, 4-8 mM, 5-9 mM, 6-10 mM, 7-11 mM, 8-12 mM, 9-13 mM, 10-14 mM, 11-15 mM, 0-5 mM, 1-6 mM, 2-7 mM, 3-8 mM, 4-9 mM, 5-10 mM, 6-11 mM, 7-12 mM, 8-13 mM, 9-14 mM, 10-15 mM, 0-6 mM, 1-7 mM, 2-8 mM, 3-9 mM, 4-10 mM, 5-11 mM, 6-12 mM, 7-13 mM, 8-14 mM, 9-15 mM, 0-7 mM, 1-8 mM, 2-9 mM, 3-10 mM, 4-11 mM, 5-12 mM, 6-13 mM, 7-14 mM, 8-15 mM, 0-8 mM, 1-9 mM, 2-10 mM, 3-11 mM, 4-12 mM, 5-13 mM, 6-14 mM, 7-15 mM, 0-9 mM, 1-10 mM, 2-11 mM, 3-12 mM, 4-13 mM, 5-14 mM, 6-15 mM, 0-10 mM, 1-11 mM, 2-12 mM, 3-13 mM, 4-14 mM, 5-15 mM, 0-11 mM, 1-12 mM, 2-13 mM, 3-14 mM, 4-15 mM, 0-12 mM, 1-13 mM, 2-14 mM, 3-15 mM, 0-13 mM, 1-14 mM, 2-15 mM, 0-14 mM, 1-15 mM, or 0-15 mM.

### Sodium Chloride

[0581] In certain embodiments, at least one of the components in the formulation is sodium chloride.

[0582] In certain embodiments, the concentration of sodium chloride in a formulation may be, but is not limited to, 75 mM, 76 mM, 77 mM, 78 mM, 79 mM, 80 mM, 81 mM, 82 mM, 83 mM, 84 mM, 85 mM, 86 mM, 87 mM, 88 mM, 89 mM, 90 mM, 91 mM, 92 mM, 93 mM, 94 mM, 95 mM, 96 mM, 97 mM, 98 mM, 99 mM, 100 mM, 101 mM, 102 mM, 103 mM, 104 mM, 105 mM, 106 mM, 107 mM, 108 mM, 109 mM, 110 mM, 111 mM, 112 mM, 113 mM, 114 mM, 115 mM, 116 mM, 117 mM, 118 mM, 119 mM, 120 mM, 121 mM, 122 mM, 123 mM, 124 mM, 125 mM, 126 mM, 127 mM, 128 mM, 129 mM, 130 mM, 131 mM, 132 mM, 133 mM, 134 mM, 135 mM, 136 mM, 137 mM, 138 mM, 139 mM, 140 mM, 141 mM, 142 mM, 143 mM, 144 mM, 145 mM, 146 mM, 147 mM, 148 mM, 149 mM, 150 mM, 151 mM, 152 mM, 153 mM, 154 mM, 155 mM, 156 mM, 157 mM, 158 mM, 159 mM, 160 mM, 161 mM, 162 mM, 163 mM, 164 mM, 165 mM, 166 mM, 167 mM, 168 mM, 169 mM, 170 mM, 171 mM, 172 mM, 173 mM, 174 mM, 175 mM, 176 mM, 177 mM, 178 mM, 179 mM, 180 mM, 181 mM, 182 mM, 183 mM, 184 mM, 185 mM, 186 mM, 187 mM, 188 mM, 189 mM, 190 mM, 191 mM, 192 mM, 193 mM, 194 mM, 195 mM, 196 mM, 197 mM, 198 mM, 199 mM, 200 mM, 201 mM, 202 mM, 203 mM, 204 mM, 205 mM, 206 mM, 207 mM, 208 mM, 209 mM, 210 mM, 211 mM, 212 mM, 213 mM, 214 mM, 215 mM, 216 mM, 217 mM, 218 mM, 219 mM, or 220 mM.

[0583] The formulation may comprise sodium chloride in a range of 75-85 mM, 80-90 mM, 85-95 mM, 90-100 mM, 95-105 mM, 100-110 mM, 105-115 mM, 110-120 mM, 115-125 mM, 120-130 mM, 125-135 mM, 130-140 mM, 135-145 mM, 140-150 mM, 145-155 mM, 150-160 mM, 155-165 mM, 160-170 mM, 165-175 mM, 170-180 mM, 175-185 mM, 180-190 mM, 185-195 mM, 190-200 mM, 75-95 mM, 80-100 mM, 85-105 mM, 90-110 mM, 95-115 mM, 100-120 mM, 105-125 mM, 110-130 mM, 115-135 mM, 120-140 mM, 125-145 mM, 130-150 mM, 135-155 mM, 140-160 mM, 145-165 mM, 150-170 mM, 155-175 mM, 160-180 mM, 165-185 mM, 170-190 mM, 175-195 mM, 180-200 mM, 75-100 mM, 80-105 mM, 85-110 mM, 90-115 mM, 95-120 mM, 100-125 mM, 105-130 mM, 110-135 mM, 115-140 mM, 120-145 mM, 125-150 mM, 130-155 mM, 135-160 mM, 140-165 mM, 145-170 mM, 150-175 mM, 155-180 mM, 160-185 mM, 165-190 mM, 170-195 mM, 175-200 mM, 75-105 mM, 80-110 mM, 85-115 mM, 90-120 mM, 95-125 mM, 100-130 mM, 105-135 mM, 110-140 mM, 115-145 mM, 120-150 mM, 125-155 mM, 130-160 mM, 135-165 mM, 140-170 mM, 145-175 mM, 150-180 mM, 155-185 mM, 160-190 mM, 165-195 mM, 170-200 mM, 75-115 mM, 80-120 mM, 85-125 mM, 90-130 mM, 95-135 mM, 100-140 mM, 105-145 mM, 110-150 mM, 115-155 mM, 120-160 mM, 125-165 mM, 130-170 mM, 135-175 mM, 140-180 mM, 145-185 mM, 150-190 mM, 155-195 mM, 160-200 mM, 75-120 mM, 80-125 mM, 85-130 mM, 90-135 mM, 95-140 mM, 100-145 mM, 105-150 mM, 110-155 mM, 115-160 mM, 120-165 mM, 125-170 mM, 130-175 mM, 135-180 mM, 140-185 mM, 145-190 mM, 150-195 mM, 155-200 mM, 75-125 mM, 80-130 mM, 85-135 mM, 90-140 mM, 95-145 mM, 100-150 mM, 105-155 mM, 110-160 mM, 115-165 mM, 120-170 mM, 125-175 mM, 130-180 mM, 135-185 mM, 140-190 mM, 145-195 mM, 150-200 mM, 75-125 mM, 80-130 mM, 85-135 mM, 90-140 mM, 95-145 mM, 100-150 mM, 105-155 mM, 110-160 mM, 115-165 mM, 120-170 mM, 125-175 mM, 130-180 mM, 135-185 mM, 140-190 mM, 145-195 mM, 150-200 mM, 75-135 mM, 80-140 mM, 85-145 mM, 90-150 mM, 95-155 mM, 100-160 mM, 105-165 mM, 110-170 mM, 115-175 mM, 120-180 mM, 125-185 mM, 130-190 mM, 135-195 mM, 140-200 mM, 75-145 mM, 80-150 mM, 85-155 mM, 90-160 mM, 95-165 mM, 100-170 mM, 105-175 mM, 110-180 mM, 115-185 mM, 120-190 mM, 125-195 mM, 130-200 mM, 75-155 mM, 80-160 mM, 85-165 mM, 90-170 mM, 95-175 mM, 100-180 mM, 105-185 mM, 110-190 mM, 115-195 mM, 120-200 mM, 75-165 mM, 80-170 mM, 85-175 mM, 90-180 mM, 95-185 mM, 100-190 mM, 105-195 mM, 110-200 mM, 75-175 mM, 80-180 mM, 85-185 mM, 90-190 mM, 95-195 mM, 100-200 mM, 80-220 mM, 90-220 mM, 100-220 mM, 110-220 mM, 120-220 mM, 130-220 mM, 140-220 mM, 150-220 mM, 160-220 mM, 170-220 mM, 180-220 mM, 190-220 mM, 200-220 mM, or 210-220 mM.

[0584] In certain embodiments, the formulation may comprise 180 mM of sodium chloride.

### Potassium Chloride

[0585] In certain embodiments, at least one of the components in the formulation is potassium chloride.

[0586] In certain embodiments, the concentration of potassium chloride in a formulation may be, but is not limited to, 0.1 mM, 0.2 mM, 0.3 mM, 0.4 mM, 0.5 mM, 0.6 mM, 0.7 mM, 0.8 mM, 0.9 mM, 1 mM, 1.1 mM, 1.2 mM, 1.3 mM, 1.4 mM, 1.5 mM, 1.6 mM, 1.7 mM, 1.8 mM, 1.9 mM, 2 mM, 2.1 mM, 2.2 mM, 2.3 mM, 2.4 mM, 2.5 mM, 2.6 mM, 2.7 mM, 2.8 mM, 2.9 mM, 3 mM, 3.1 mM, 3.2 mM, 3.3 mM, 3.4 mM, 3.5 mM, 3.6 mM, 3.7 mM, 3.8 mM, 3.9 mM, 4 mM, 4.1 mM, 4.2 mM, 4.3 mM, 4.4 mM, 4.5 mM, 4.6 mM, 4.7 mM, 4.8 mM, 4.9 mM, 5 mM, 5.1 mM, 5.2 mM, 5.3 mM, 5.4 mM, 5.5 mM, 5.6 mM, 5.7 mM, 5.8 mM, 5.9 mM, 6 mM, 6.1 mM, 6.2 mM, 6.3 mM, 6.4 mM, 6.5 mM, 6.6 mM, 6.7 mM, 6.8 mM, 6.9 mM, 7 mM, 7.1 mM, 7.2 mM, 7.3 mM, 7.4 mM, 7.5 mM, 7.6 mM, 7.7 mM, 7.8 mM, 7.9 mM, 8 mM, 8.1 mM, 8.2 mM, 8.3 mM, 8.4 mM, 8.5 mM, 8.6 mM, 8.7 mM, 8.8 mM, 8.9 mM, 9 mM, 9.1 mM, 9.2 mM, 9.3 mM, 9.4 mM, 9.5 mM, 9.6 mM, 9.7 mM, 9.8 mM, 9.9 mM, 10 mM, 10.1 mM, 10.2 mM, 10.3 mM, 10.4 mM, 10.5 mM, 10.6 mM, 10.7 mM, 10.8 mM, 10.9 mM, 11 mM, 11.1 mM, 11.2 mM, 11.3 mM, 11.4 mM, 11.5 mM, 11.6 mM, 11.7 mM, 11.8 mM, 11.9 mM, 12 mM, 12.1 mM, 12.2 mM, 12.3 mM, 12.4 mM, 12.5 mM, 12.6 mM, 12.7 mM, 12.8 mM, 12.9 mM, 13 mM, 13.1 mM, 13.2 mM, 13.3 mM, 13.4 mM, 13.5 mM, 13.6 mM, 13.7 mM, 13.8 mM, 13.9 mM, 14 mM, 14.1 mM, 14.2 mM, 14.3 mM, 14.4 mM, 14.5 mM, 14.6 mM, 14.7 mM, 14.8 mM, 14.9 mM or 15 mM.

[0587] The formulation may comprise potassium chloride in a range of 0-0.5 mM, 0.1-0.6 mM, 0.2-0.7 mM, 0.3-0.8 mM, 0.4-0.9 mM, 0.5-1 mM, 0.6-1.1 mM, 0.7-1.2 mM, 0.8-1.3 mM, 0.9-1.4 mM, 1-1.5 mM, 1.1-1.6 mM, 1.2-1.7 mM, 1.3-1.8 mM, 1.4-1.9 mM, 1.5-2 mM, 1.6-2.1 mM, 1.7-2.2 mM, 1.8-2.3 mM, 1.9-2.4 mM, 2-2.5 mM, 2.1-2.6 mM, 2.2-2.7 mM, 2.3-2.8 mM, 2.4-2.9 mM, 2.5-3 mM, 2.6-3.1 mM, 2.7-3.2 mM, 2.8-3.3 mM, 2.9-3.4 mM, 3-3.5 mM, 3.1-3.6 mM, 3.2-3.7 mM, 3.3-3.8 mM, 3.4-3.9 mM, 3.5-4 mM, 3.6-4.1 mM, 3.7-4.2 mM, 3.8-4.3 mM, 3.9-4.4 mM, 4-4.5 mM, 4.1-4.6 mM, 4.2-4.7 mM, 4.3-4.8 mM, 4.4-4.9 mM, 4.5-5 mM, 4.6-5.1 mM, 4.7-5.2 mM, 4.8-5.3 mM, 4.9-5.4 mM, 5-5.5 mM, 5.1-5.6 mM, 5.2-5.7 mM, 5.3-5.8 mM, 5.4-5.9 mM, 5.5-6 mM, 5.6-6.1 mM, 5.7-6.2 mM, 5.8-6.3 mM, 5.9-6.4 mM, 6-6.5 mM, 6.1-6.6 mM, 6.2-6.7 mM, 6.3-6.8 mM, 6.4-6.9 mM, 6.5-7 mM, 6.6-7.1 mM, 6.7-7.2 mM, 6.8-7.3 mM, 6.9-7.4 mM, 7-7.5 mM, 7.1-7.6 mM, 7.2-7.7 mM, 7.3-7.8 mM, 7.4-7.9 mM, 7.5-8 mM, 7.6-8.1 mM, 7.7-8.2 mM, 7.8-8.3 mM, 7.9-8.4 mM, 8-8.5 mM, 8.1-8.6 mM, 8.2-8.7 mM, 8.3-8.8 mM, 8.4-8.9 mM, 8.5-9 mM, 8.6-9.1 mM, 8.7-9.2 mM, 8.8-9.3 mM, 8.9-9.4 mM, 9-9.5 mM, 9.1-9.6 mM, 9.2-9.7 mM, 9.3-9.8 mM, 9.4-9.9 mM, 9.5-10 mM, 9.6-10.1 mM, 9.7-10.2 mM, 9.8-10.3 mM, 9.9-10.4 mM, 10-10.5 mM, 10.1-10.6 mM, 10.2-10.7 mM, 10.3-10.8 mM, 10.4-10.9 mM, 10.5-11 mM, 10.6-11.1 mM, 10.7-11.2 mM, 10.8-11.3 mM, 10.9-11.4 mM, 11-11.5 mM, 11.1-11.6 mM, 11.2-11.7 mM, 11.3-11.8 mM, 11.4-11.9 mM, 11.5-12 mM, 11.6-12.1 mM, 11.7-12.2 mM, 11.8-12.3 mM, 11.9-12.4 mM, 12-12.5 mM, 12.1-12.6 mM, 12.2-12.7 mM, 12.3-12.8 mM, 12.4-12.9 mM, 12.5-13 mM, 12.6-13.1 mM, 12.7-13.2 mM, 12.8-13.3 mM, 12.9-13.4 mM, 13-13.5 mM, 13.1-13.6 mM, 13.2-13.7 mM, 13.3-13.8 mM, 13.4-13.9 mM, 13.5-14 mM, 13.6-14.1 mM, 13.7-14.2 mM, 13.8-14.3 mM, 13.9-14.4 mM, 14-14.5 mM, 14.1-14.6 mM, 14.2-14.7 mM, 14.3-14.8 mM, 14.4-14.9 mM, 14.5-15 mM, 0-1 mM, 1-2 mM, 2-3 mM, 3-4 mM, 4-5 mM, 5-6 mM, 6-7 mM, 7-8 mM, 8-9 mM, 9-10 mM, 10-11 mM, 11-12 mM, 12-13 mM, 13-14 mM, 14-15 mM, 15-16 mM, 0-2 mM, 1-3 mM, 2-4 mM, 3-5 mM, 4-6 mM, 5-7 mM, 6-8 mM, 7-9 mM, 8-10 mM, 9-11 mM, 10-12 mM, 11-13 mM, 12-14 mM, 13-15 mM, 0-3 mM, 1-4 mM, 2-5 mM, 3-6 mM, 4-7 mM, 5-8 mM, 6-9 mM, 7-10 mM, 8-11 mM, 9-12 mM, 10-13 mM, 11-14 mM, 12-15 mM, 0-4 mM, 1-5 mM, 2-6 mM, 3-7 mM, 4-8 mM, 5-9 mM, 6-10 mM, 7-11 mM, 8-12 mM, 9-13 mM, 10-14 mM, 11-15 mM, 0-5 mM, 1-6 mM, 2-7 mM, 3-8 mM, 4-9 mM, 5-10 mM, 6-11 mM, 7-12 mM, 8-13 mM, 9-14 mM, 10-15 mM, 0-6 mM, 1-7 mM, 2-8 mM, 3-9 mM, 4-10 mM, 5-11 mM, 6-12 mM, 7-13 mM, 8-14 mM, 9-15 mM, 0-7 mM, 1-8 mM, 2-9 mM, 3-10 mM, 4-11 mM, 5-12 mM, 6-13 mM, 7-14 mM, 8-15 mM, 0-8 mM, 1-9 mM, 2-10 mM, 3-11 mM, 4-12 mM, 5-13 mM, 6-14 mM, 7-15 mM, 0-9 mM, 1-10 mM, 2-11 mM, 3-12 mM, 4-13 mM, 5-14 mM, 6-15 mM, 0-10 mM, 1-11 mM, 2-12 mM, 3-13 mM, 4-14 mM, 5-15 mM, 0-11 mM, 1-12 mM, 2-13 mM, 3-14 mM, 4-15 mM, 0-12 mM, 1-13 mM, 2-14 mM, 3-15 mM, 0-13 mM, 1-14 mM, 2-15 mM, 0-14 mM, 1-15 mM, or 0-15 mM.

### Magnesium Chloride

[0588] In certain embodiments, at least one of the components in the formulation is magnesium chloride.

[0589] In certain embodiments, the concentration of magnesium chloride may be, but is not limited to, 1 mM, 2 mM, 3 mM, 4 mM, 5 mM, 6 mM, 7 mM, 8 mM, 9 mM, 10 mM, 11 mM, 12 mM, 13 mM, 14 mM, 15 mM, 16 mM, 17 mM, 18 mM, 19 mM, 20 mM, 21 mM, 22 mM, 23 mM, 24 mM, 25 mM, 26 mM, 27 mM, 28 mM, 29 mM, 30 mM, 31 mM, 32 mM, 33 mM, 34 mM, 35 mM, 36 mM, 37 mM, 38 mM, 39 mM, 40 mM, 41 mM, 42 mM, 43 mM, 44 mM, 45 mM, 46 mM, 47 mM, 48 mM, 49 mM, 50 mM, 51 mM, 52 mM, 53 mM, 54 mM, 55 mM, 56 mM, 57 mM, 58 mM, 59 mM, 60 mM, 61 mM, 62 mM, 63 mM, 64 mM, 65 mM, 66 mM, 67 mM, 68 mM, 69 mM, 70 mM, 71 mM, 72 mM, 73 mM, 74 mM, 75 mM, 76 mM, 77 mM, 78 mM, 79 mM, 80 mM, 81 mM, 82 mM, 83 mM, 84 mM, 85 mM, 86 mM, 87 mM, 88 mM, 89 mM, 90 mM, 91 mM, 92 mM, 93 mM, 94 mM, 95 mM, 96 mM, 97 mM, 98 mM, 99 mM, or 100 mM.

[0590] The formulation may comprise magnesium chloride in a range of 0-5 mM, 1-5 mM, 2-5 mM, 3-5 mM, 4-5 mM, 0-10 mM, 1-10 mM, 2-10 mM, 3-10 mM, 4-10 mM, 5-10 mM, 6-10 mM, 7-10 mM, 8-10 mM, 9-10 mM, 0-25 mM, 1-25 mM, 2-25 mM, 3-25 mM, 4-25 mM, 5-25 mM, 6-25 mM, 7-25 mM, 8-25 mM, 9-25 mM, 10-25 mM, 11-25 mM, 12-25 mM, 13-25 mM, 14-25 mM, 15-25 mM, 16-25 mM, 17-25 mM, 18-25 mM, 19-25 mM, 20-25 mM, 21-25 mM, 22-25 mM, 23-25 mM, 24-25 mM, 0-50 mM, 1-50 mM, 2-50 mM, 3-50 mM, 4-50 mM, 5-50 mM, 6-50 mM, 7-50 mM, 8-50 mM, 9-50 mM, 10-50 mM, 11-50 mM, 12-50 mM, 13-50 mM, 14-50 mM, 15-50 mM, 16-50 mM, 17-50 mM, 18-50 mM, 19-50 mM, 20-50 mM, 21-50 mM, 22-50 mM, 23-50 mM, 24-50 mM, 25-50 mM, 26-50 mM, 27-50 mM, 28-50 mM, 29-50 mM, 30-50 mM, 31-50 mM, 32-50 mM, 33-50 mM, 34-50 mM, 35-50 mM, 36-50 mM, 37-50 mM, 38-50 mM, 39-50 mM, 40-50 mM, 41-50 mM, 42-50 mM, 43-50 mM, 44-50 mM, 45-50 mM, 46-50 mM, 47-50 mM, 48-50 mM, 49-50 mM, 0-75 mM, 1-75 mM, 2-75 mM, 3-75 mM, 4-75 mM, 5-75 mM, 6-75 mM, 7-75 mM, 8-75 mM, 9-75 mM, 10-75 mM, 11-75 mM, 12-75 mM, 13-75 mM, 14-75 mM, 15-75 mM, 16-75 mM, 17-75 mM, 18-75 mM, 19-75 mM, 20-75 mM, 21-75 mM, 22-75 mM, 23-75 mM, 24-75 mM, 25-75 mM, 26-75 mM, 27-75 mM, 28-75 mM, 29-75 mM, 30-75 mM, 31-75 mM, 32-75 mM, 33-75 mM, 34-75 mM, 35-75 mM, 36-75 mM, 37-75 mM, 38-75 mM, 39-75 mM, 40-75 mM, 41-75 mM, 42-75 mM, 43-75 mM, 44-75 mM, 45-75 mM, 46-75 mM, 47-75 mM, 48-75 mM, 49-75 mM, 50-75 mM, 51-75 mM, 52-75 mM, 53-75 mM, 54-75 mM, 55-75 mM, 56-75 mM, 57-75 mM, 58-75 mM, 59-75 mM, 60-75 mM, 61-75 mM, 62-75 mM, 63-75 mM, 64-75 mM, 65-75 mM, 66-75 mM, 67-75 mM, 68-75 mM, 69-75 mM, 70-75 mM, 71-75 mM, 72-75 mM, 73-75 mM, 74-75 mM, 50-100 mM, 60-100 mM, 75-100 mM, 80-100 mM, or 90-100 mM.

### Tris

[0591] In certain embodiments, at least one of the components in the formulation is Tris (also called tris(hydroxymethyl)aminomethane, tromethamine or THAM).

[0592] In certain embodiments, the concentration of Tris in a formulation may be, but is not limited to, 0.1 mM, 0.2 mM, 0.3 mM, 0.4 mM, 0.5 mM, 0.6 mM, 0.7 mM, 0.8 mM, 0.9 mM, 1 mM, 1.1 mM, 1.2 mM, 1.3 mM, 1.4 mM, 1.5 mM, 1.6 mM, 1.7 mM, 1.8 mM, 1.9 mM, 2 mM, 2.1 mM, 2.2 mM, 2.3 mM, 2.4 mM, 2.5 mM, 2.6 mM, 2.7 mM, 2.8 mM, 2.9 mM, 3 mM, 3.1 mM, 3.2 mM, 3.3 mM, 3.4 mM, 3.5 mM, 3.6 mM, 3.7 mM, 3.8 mM, 3.9 mM, 4 mM, 4.1 mM, 4.2 mM, 4.3 mM, 4.4 mM, 4.5 mM, 4.6 mM, 4.7 mM, 4.8 mM, 4.9 mM, 5 mM, 5.1 mM, 5.2 mM, 5.3 mM, 5.4 mM, 5.5 mM, 5.6 mM, 5.7 mM, 5.8 mM, 5.9 mM, 6 mM, 6.1 mM, 6.2 mM, 6.3 mM, 6.4 mM, 6.5 mM, 6.6 mM, 6.7 mM, 6.8 mM, 6.9 mM, 7 mM, 7.1 mM, 7.2 mM, 7.3 mM, 7.4 mM, 7.5 mM, 7.6 mM, 7.7 mM, 7.8 mM, 7.9 mM, 8 mM, 8.1 mM, 8.2 mM, 8.3 mM, 8.4 mM, 8.5 mM, 8.6 mM, 8.7 mM, 8.8 mM, 8.9 mM, 9 mM, 9.1 mM, 9.2 mM, 9.3 mM, 9.4 mM, 9.5 mM, 9.6 mM, 9.7 mM, 9.8 mM, 9.9 mM, 10 mM, 10.1 mM, 10.2 mM, 10.3 mM, 10.4 mM, 10.5 mM, 10.6 mM, 10.7 mM, 10.8 mM, 10.9 mM, 11 mM, 11.1 mM, 11.2 mM, 11.3 mM, 11.4 mM, 11.5 mM, 11.6 mM, 11.7 mM, 11.8 mM, 11.9 mM, 12 mM, 12.1 mM, 12.2 mM, 12.3 mM, 12.4 mM, 12.5 mM, 12.6 mM, 12.7 mM, 12.8 mM, 12.9 mM, 13 mM, 13.1 mM, 13.2 mM, 13.3 mM, 13.4 mM, 13.5 mM, 13.6 mM, 13.7 mM, 13.8 mM, 13.9 mM, 14 mM, 14.1 mM, 14.2 mM, 14.3 mM, 14.4 mM, 14.5 mM, 14.6 mM, 14.7 mM, 14.8 mM, 14.9 mM or 15 mM.

[0593] The formulation may comprise Tris in a range of 0-0.5 mM, 0.1-0.6 mM, 0.2-0.7 mM, 0.3-0.8 mM, 0.4-0.9 mM, 0.5-1 mM, 0.6-1.1 mM, 0.7-1.2 mM, 0.8-1.3 mM, 0.9-1.4 mM, 1-1.5 mM, 1.1-1.6 mM, 1.2-1.7 mM, 1.3-1.8 mM, 1.4-1.9 mM, 1.5-2 mM, 1.6-2.1 mM, 1.7-2.2 mM, 1.8-2.3 mM, 1.9-2.4 mM, 2-2.5 mM, 2.1-2.6 mM, 2.2-2.7 mM, 2.3-2.8 mM, 2.4-2.9 mM, 2.5-3 mM, 2.6-3.1 mM, 2.7-3.2 mM, 2.8-3.3 mM, 2.9-3.4 mM, 3-3.5 mM, 3.1-3.6 mM, 3.2-3.7 mM, 3.3-3.8 mM, 3.4-3.9 mM, 3.5-4 mM, 3.6-4.1 mM, 3.7-4.2 mM, 3.8-4.3 mM, 3.9-4.4 mM, 4-4.5 mM, 4.1-4.6 mM, 4.2-4.7 mM, 4.3-4.8 mM, 4.4-4.9 mM, 4.5-5 mM, 4.6-5.1 mM, 4.7-5.2 mM, 4.8-5.3 mM, 4.9-5.4 mM, 5-5.5 mM, 5.1-5.6 mM, 5.2-5.7 mM, 5.3-5.8 mM, 5.4-5.9 mM, 5.5-6 mM, 5.6-6.1 mM, 5.7-6.2 mM, 5.8-6.3 mM, 5.9-6.4 mM, 6-6.5 mM, 6.1-6.6 mM, 6.2-6.7 mM, 6.3-6.8 mM, 6.4-6.9 mM, 6.5-7 mM, 6.6-7.1 mM, 6.7-7.2 mM, 6.8-7.3 mM, 6.9-7.4 mM, 7-7.5 mM, 7.1-7.6 mM, 7.2-7.7 mM, 7.3-7.8 mM, 7.4-7.9 mM, 7.5-8 mM, 7.6-8.1 mM, 7.7-8.2 mM, 7.8-8.3 mM, 7.9-8.4 mM, 8-8.5 mM, 8.1-8.6 mM, 8.2-8.7 mM, 8.3-8.8 mM, 8.4-8.9 mM, 8.5-9 mM, 8.6-9.1 mM, 8.7-9.2 mM, 8.8-9.3 mM, 8.9-9.4 mM, 9-9.5 mM, 9.1-9.6 mM, 9.2-9.7 mM, 9.3-9.8 mM, 9.4-9.9 mM, 9.5-10 mM, 9.6-10.1 mM, 9.7-10.2 mM, 9.8-10.3 mM, 9.9-10.4 mM, 10-10.5 mM, 10.1-10.6 mM, 10.2-10.7 mM, 10.3-10.8 mM, 10.4-10.9 mM, 10.5-11 mM, 10.6-11.1 mM, 10.7-11.2 mM, 10.8-11.3 mM, 10.9-11.4 mM, 11-11.5 mM, 11.1-11.6 mM, 11.2-11.7 mM, 11.3-11.8 mM, 11.4-11.9 mM, 11.5-12 mM, 11.6-12.1 mM, 11.7-12.2 mM, 11.8-12.3 mM, 11.9-12.4 mM, 12-12.5 mM, 12.1-12.6 mM, 12.2-12.7 mM, 12.3-12.8 mM, 12.4-12.9 mM, 12.5-13 mM, 12.6-13.1 mM, 12.7-13.2 mM, 12.8-13.3 mM, 12.9-13.4 mM, 13-13.5 mM, 13.1-13.6 mM, 13.2-13.7 mM, 13.3-13.8 mM, 13.4-13.9 mM, 13.5-14 mM, 13.6-14.1 mM, 13.7-14.2 mM, 13.8-14.3 mM, 13.9-14.4 mM, 14-14.5 mM, 14.1-14.6 mM, 14.2-14.7 mM, 14.3-14.8 mM, 14.4-14.9 mM, 14.5-15 mM, 0-1 mM, 1-2 mM, 2-3 mM, 3-4 mM, 4-5 mM, 5-6 mM, 6-7 mM, 7-8 mM, 8-9 mM, 9-10 mM, 10-11 mM, 11-12 mM, 12-13 mM, 13-14 mM, 14-15 mM, 15-16 mM, 0-2 mM, 1-3 mM, 2-4 mM, 3-5 mM, 4-6 mM, 5-7 mM, 6-8 mM, 7-9 mM, 8-10 mM, 9-11 mM, 10-12 mM, 11-13 mM, 12-14 mM, 13-15 mM, 0-3 mM, 1-4 mM, 2-5 mM, 3-6 mM, 4-7 mM, 5-8 mM, 6-9 mM, 7-10 mM, 8-11 mM, 9-12 mM, 10-13 mM, 11-14 mM, 12-15 mM, 0-4 mM, 1-5 mM, 2-6 mM, 3-7 mM, 4-8 mM, 5-9 mM, 6-10 mM, 7-11 mM, 8-12 mM, 9-13 mM, 10-14 mM, 11-15 mM, 0-5 mM, 1-6 mM, 2-7 mM, 3-8 mM, 4-9 mM, 5-10 mM, 6-11 mM, 7-12 mM, 8-13 mM, 9-14 mM, 10-15 mM, 0-6 mM, 1-7 mM, 2-8 mM, 3-9 mM, 4-10 mM, 5-11 mM, 6-12 mM, 7-13 mM, 8-14 mM, 9-15 mM, 0-7 mM, 1-8 mM, 2-9 mM, 3-10 mM, 4-11 mM, 5-12 mM, 6-13 mM, 7-14 mM, 8-15 mM, 0-8 mM, 1-9 mM, 2-10 mM, 3-11 mM, 4-12 mM, 5-13 mM, 6-14 mM, 7-15 mM, 0-9 mM, 1-10 mM, 2-11 mM, 3-12 mM, 4-13 mM, 5-14 mM, 6-15 mM, 0-10 mM, 1-11 mM, 2-12 mM, 3-13 mM, 4-14 mM, 5-15 mM, 0-11 mM, 1-12 mM, 2-13 mM, 3-14 mM, 4-15 mM, 0-12 mM, 1-13 mM, 2-14 mM, 3-15 mM, 0-13 mM, 1-14 mM, 2-15 mM, 0-14 mM, 1-15 mM, or 0-15 mM.

### Histidine

[0594] In certain embodiments, at least one of the components in the formulation is Histidine.

[0595] In certain embodiments, the concentration of Histidine in a formulation may be, but is not limited to, 0.1 mM, 0.2 mM, 0.3 mM, 0.4 mM, 0.5 mM, 0.6 mM, 0.7 mM, 0.8 mM, 0.9 mM, 1 mM, 1.1 mM, 1.2 mM, 1.3 mM, 1.4 mM, 1.5 mM, 1.6 mM, 1.7 mM, 1.8 mM, 1.9 mM, 2 mM, 2.1 mM, 2.2 mM, 2.3 mM, 2.4 mM, 2.5 mM, 2.6 mM, 2.7 mM, 2.8 mM, 2.9 mM, 3 mM, 3.1 mM, 3.2 mM, 3.3 mM, 3.4 mM, 3.5 mM, 3.6 mM, 3.7 mM, 3.8 mM, 3.9 mM, 4 mM, 4.1 mM, 4.2 mM, 4.3 mM, 4.4 mM, 4.5 mM, 4.6 mM, 4.7 mM, 4.8 mM, 4.9 mM, 5 mM, 5.1 mM, 5.2 mM, 5.3 mM, 5.4 mM, 5.5 mM, 5.6 mM, 5.7 mM, 5.8 mM, 5.9 mM, 6 mM, 6.1 mM, 6.2 mM, 6.3 mM, 6.4 mM, 6.5 mM, 6.6 mM, 6.7 mM, 6.8 mM, 6.9 mM, 7 mM, 7.1 mM, 7.2 mM, 7.3 mM, 7.4 mM, 7.5 mM, 7.6 mM, 7.7 mM, 7.8 mM, 7.9 mM, 8 mM, 8.1 mM, 8.2 mM, 8.3 mM, 8.4 mM, 8.5 mM, 8.6 mM, 8.7 mM, 8.8 mM, 8.9 mM, 9 mM, 9.1 mM, 9.2 mM, 9.3 mM, 9.4 mM, 9.5 mM, 9.6 mM, 9.7 mM, 9.8 mM, 9.9 mM, 10 mM, 10.1 mM, 10.2 mM, 10.3 mM, 10.4 mM, 10.5 mM, 10.6 mM, 10.7 mM, 10.8 mM, 10.9 mM, 11 mM, 11.1 mM, 11.2 mM, 11.3 mM, 11.4 mM, 11.5 mM, 11.6 mM, 11.7 mM, 11.8 mM, 11.9 mM, 12 mM, 12.1 mM, 12.2 mM, 12.3 mM, 12.4 mM, 12.5 mM, 12.6 mM, 12.7 mM, 12.8 mM, 12.9 mM, 13 mM, 13.1 mM, 13.2 mM, 13.3 mM, 13.4 mM, 13.5 mM, 13.6 mM, 13.7 mM, 13.8 mM, 13.9 mM, 14 mM, 14.1 mM, 14.2 mM, 14.3 mM, 14.4 mM, 14.5 mM, 14.6 mM, 14.7 mM, 14.8 mM, 14.9 mM or 15 mM.

[0596] The formulation may comprise Histidine in a range of 0-0.5 mM, 0.1-0.6 mM, 0.2-0.7 mM, 0.3-0.8 mM, 0.4-0.9 mM, 0.5-1 mM, 0.6-1.1 mM, 0.7-1.2 mM, 0.8-1.3 mM, 0.9-1.4 mM, 1-1.5 mM, 1.1-1.6 mM, 1.2-1.7 mM, 1.3-1.8 mM, 1.4-1.9 mM, 1.5-2 mM, 1.6-2.1 mM, 1.7-2.2 mM, 1.8-2.3 mM, 1.9-2.4 mM, 2-2.5 mM, 2.1-2.6 mM, 2.2-2.7 mM, 2.3-2.8 mM, 2.4-2.9 mM, 2.5-3 mM, 2.6-3.1 mM, 2.7-3.2 mM, 2.8-3.3 mM, 2.9-3.4 mM, 3-3.5 mM, 3.1-3.6 mM, 3.2-3.7 mM, 3.3-3.8 mM, 3.4-3.9 mM, 3.5-4 mM, 3.6-4.1 mM, 3.7-4.2 mM, 3.8-4.3 mM, 3.9-4.4 mM, 4-4.5 mM, 4.1-4.6 mM, 4.2-4.7 mM, 4.3-4.8 mM, 4.4-4.9 mM, 4.5-5 mM, 4.6-5.1 mM, 4.7-5.2 mM, 4.8-5.3 mM, 4.9-5.4 mM, 5-5.5 mM, 5.1-5.6 mM, 5.2-5.7 mM, 5.3-5.8 mM, 5.4-5.9 mM, 5.5-6 mM, 5.6-6.1 mM, 5.7-6.2 mM, 5.8-6.3 mM, 5.9-6.4 mM, 6-6.5 mM, 6.1-6.6 mM, 6.2-6.7 mM, 6.3-6.8 mM, 6.4-6.9 mM, 6.5-7 mM, 6.6-7.1 mM, 6.7-7.2 mM, 6.8-7.3 mM, 6.9-7.4 mM, 7-7.5 mM, 7.1-7.6 mM, 7.2-7.7 mM, 7.3-7.8 mM, 7.4-7.9 mM, 7.5-8 mM, 7.6-8.1 mM, 7.7-8.2 mM, 7.8-8.3 mM, 7.9-8.4 mM, 8-8.5 mM, 8.1-8.6 mM, 8.2-8.7 mM, 8.3-8.8 mM, 8.4-8.9 mM, 8.5-9 mM, 8.6-9.1 mM, 8.7-9.2 mM, 8.8-9.3 mM, 8.9-9.4 mM, 9-9.5 mM, 9.1-9.6 mM, 9.2-9.7 mM, 9.3-9.8 mM, 9.4-9.9 mM, 9.5-10 mM, 9.6-10.1 mM, 9.7-10.2 mM, 9.8-10.3 mM, 9.9-10.4 mM, 10-10.5 mM, 10.1-10.6 mM, 10.2-10.7 mM, 10.3-10.8 mM, 10.4-10.9 mM, 10.5-11 mM, 10.6-11.1 mM, 10.7-11.2 mM, 10.8-11.3 mM, 10.9-11.4 mM, 11-11.5 mM, 11.1-11.6 mM, 11.2-11.7 mM, 11.3-11.8 mM, 11.4-11.9 mM, 11.5-12 mM, 11.6-12.1 mM, 11.7-12.2 mM, 11.8-12.3 mM, 11.9-12.4 mM, 12-12.5 mM, 12.1-12.6 mM, 12.2-12.7 mM, 12.3-12.8 mM, 12.4-12.9 mM, 12.5-13 mM, 12.6-13.1 mM, 12.7-13.2 mM, 12.8-13.3 mM, 12.9-13.4 mM, 13-13.5 mM, 13.1-13.6 mM, 13.2-13.7 mM, 13.3-13.8 mM, 13.4-13.9 mM, 13.5-14 mM, 13.6-14.1 mM, 13.7-14.2 mM, 13.8-14.3 mM, 13.9-14.4 mM, 14-14.5 mM, 14.1-14.6 mM, 14.2-14.7 mM, 14.3-14.8 mM, 14.4-14.9 mM, 14.5-15 mM, 0-1 mM, 1-2 mM, 2-3 mM, 3-4 mM, 4-5 mM, 5-6 mM, 6-7 mM, 7-8 mM, 8-9 mM, 9-10 mM, 10-11 mM, 11-12 mM, 12-13 mM, 13-14 mM, 14-15 mM, 15-16 mM, 0-2 mM, 1-3 mM, 2-4 mM, 3-5 mM, 4-6 mM, 5-7 mM, 6-8 mM, 7-9 mM, 8-10 mM, 9-11 mM, 10-12 mM, 11-13 mM, 12-14 mM, 13-15 mM, 0-3 mM, 1-4 mM, 2-5 mM, 3-6 mM, 4-7 mM, 5-8 mM, 6-9 mM, 7-10 mM, 8-11 mM, 9-12 mM, 10-13 mM, 11-14 mM, 12-15 mM, 0-4 mM, 1-5 mM, 2-6 mM, 3-7 mM, 4-8 mM, 5-9 mM, 6-10 mM, 7-11 mM, 8-12 mM, 9-13 mM, 10-14 mM, 11-15 mM, 0-5 mM, 1-6 mM, 2-7 mM, 3-8 mM, 4-9 mM, 5-10 mM, 6-11 mM, 7-12 mM, 8-13 mM, 9-14 mM, 10-15 mM, 0-6 mM, 1-7 mM, 2-8 mM, 3-9 mM, 4-10 mM, 5-11 mM, 6-12 mM, 7-13 mM, 8-14 mM, 9-15 mM, 0-7 mM, 1-8 mM, 2-9 mM, 3-10 mM, 4-11 mM, 5-12 mM, 6-13 mM, 7-14 mM, 8-15 mM, 0-8 mM, 1-9 mM, 2-10 mM, 3-11 mM, 4-12 mM, 5-13 mM, 6-14 mM, 7-15 mM, 0-9 mM, 1-10 mM, 2-11 mM, 3-12 mM, 4-13 mM, 5-14 mM, 6-15 mM, 0-10 mM, 1-11 mM, 2-12 mM, 3-13 mM, 4-14 mM, 5-15 mM, 0-11 mM, 1-12 mM, 2-13 mM, 3-14 mM, 4-15 mM, 0-12 mM, 1-13 mM, 2-14 mM, 3-15 mM, 0-13 mM, 1-14 mM, 2-15 mM, 0-14 mM, 1-15 mM, or 0-15 mM.

### Arginine

[0597] In certain embodiments, at least one of the components in the formulation is arginine.

[0598] In certain embodiments, the concentration of arginine may be, but is not limited to, 1 mM, 2 mM, 3 mM, 4 mM, 5 mM, 6 mM, 7 mM, 8 mM, 9 mM, 10 mM, 11 mM, 12 mM, 13 mM, 14 mM, 15 mM, 16 mM, 17 mM, 18 mM, 19 mM, 20 mM, 21 mM, 22 mM, 23 mM, 24 mM, 25 mM, 26 mM, 27 mM, 28 mM, 29 mM, 30 mM, 31 mM, 32 mM, 33 mM, 34 mM, 35 mM, 36 mM, 37 mM, 38 mM, 39 mM, 40 mM, 41 mM, 42 mM, 43 mM, 44 mM, 45 mM, 46 mM, 47 mM, 48 mM, 49 mM, 50 mM, 51 mM, 52 mM, 53 mM, 54 mM, 55 mM, 56 mM, 57 mM, 58 mM, 59 mM, 60 mM, 61 mM, 62 mM, 63 mM, 64 mM, 65 mM, 66 mM, 67 mM, 68 mM, 69 mM, 70 mM, 71 mM, 72 mM, 73 mM, 74 mM, 75 mM, 76 mM, 77 mM, 78 mM, 79 mM, 80 mM, 81 mM, 82 mM, 83 mM, 84 mM, 85 mM, 86 mM, 87 mM, 88 mM, 89 mM, 90 mM, 91 mM, 92 mM, 93 mM, 94 mM, 95 mM, 96 mM, 97 mM, 98 mM, 99 mM, or 100 mM.

[0599] The formulation may comprise arginine in a range of 0-5 mM, 1-5 mM, 2-5 mM, 3-5 mM, 4-5 mM, 0-10 mM, 1-10 mM, 2-10 mM, 3-10 mM, 4-10 mM, 5-10 mM, 6-10 mM, 7-10 mM, 8-10 mM, 9-10 mM, 0-25 mM, 1-25 mM, 2-25 mM, 3-25 mM, 4-25 mM, 5-25 mM, 6-25 mM, 7-25 mM, 8-25 mM, 9-25 mM, 10-25 mM, 11-25 mM, 12-25 mM, 13-25 mM, 14-25 mM, 15-25 mM, 16-25 mM, 17-25 mM, 18-25 mM, 19-25 mM, 20-25 mM, 21-25 mM, 22-25 mM, 23-25 mM, 24-25 mM, 0-50 mM, 1-50 mM, 2-50 mM, 3-50 mM, 4-50 mM, 5-50 mM, 6-50 mM, 7-50 mM, 8-50 mM, 9-50 mM, 10-50 mM, 11-50 mM, 12-50 mM, 13-50 mM, 14-50 mM, 15-50 mM, 16-50 mM, 17-50 mM, 18-50 mM, 19-50 mM, 20-50 mM, 21-50 mM, 22-50 mM, 23-50 mM, 24-50 mM, 25-50 mM, 26-50 mM, 27-50 mM, 28-50 mM, 29-50 mM, 30-50 mM, 31-50 mM, 32-50 mM, 33-50 mM, 34-50 mM, 35-50 mM, 36-50 mM, 37-50 mM, 38-50 mM, 39-50 mM, 40-50 mM, 41-50 mM, 42-50 mM, 43-50 mM, 44-50 mM, 45-50 mM, 46-50 mM, 47-50 mM, 48-50 mM, 49-50 mM, 0-75 mM, 1-75 mM, 2-75 mM, 3-75 mM, 4-75 mM, 5-75 mM, 6-75 mM, 7-75 mM, 8-75 mM, 9-75 mM, 10-75 mM, 11-75 mM, 12-75 mM, 13-75 mM, 14-75 mM, 15-75 mM, 16-75 mM, 17-75 mM, 18-75 mM, 19-75 mM, 20-75 mM, 21-75 mM, 22-75 mM, 23-75 mM, 24-75 mM, 25-75 mM, 26-75 mM, 27-75 mM, 28-75 mM, 29-75 mM, 30-75 mM, 31-75 mM, 32-75 mM, 33-75 mM, 34-75 mM, 35-75 mM, 36-75 mM, 37-75 mM, 38-75 mM, 39-75 mM, 40-75 mM, 41-75 mM, 42-75 mM, 43-75 mM, 44-75 mM, 45-75 mM, 46-75 mM, 47-75 mM, 48-75 mM, 49-75 mM, 50-75 mM, 51-75 mM, 52-75 mM, 53-75 mM, 54-75 mM, 55-75 mM, 56-75 mM, 57-75 mM, 58-75 mM, 59-75 mM, 60-75 mM, 61-75 mM, 62-75 mM, 63-75 mM, 64-75 mM, 65-75 mM, 66-75 mM, 67-75 mM, 68-75 mM, 69-75 mM, 70-75 mM, 71-75 mM, 72-75 mM, 73-75 mM, 74-75 mM, 50-100 mM, 60-100 mM, 75-100 mM, 80-100 mM, or 90-100 mM.

### Hydrochloric Acid

[0600] In certain embodiments, at least one of the components in the formulation is hydrochloric acid.

[0601] In certain embodiments, the concentration of hydrochloric acid in a formulation may be, but is not limited to, 0.1 mM, 0.2 mM, 0.3 mM, 0.4 mM, 0.5 mM, 0.6 mM, 0.7 mM, 0.8 mM, 0.9 mM, 1 mM, 1.1 mM, 1.2 mM, 1.3 mM, 1.4 mM, 1.5 mM, 1.6 mM, 1.7 mM, 1.8 mM, 1.9 mM, 2 mM, 2.1 mM, 2.2 mM, 2.3 mM, 2.4 mM, 2.5 mM, 2.6 mM, 2.7 mM, 2.8 mM, 2.9 mM, 3 mM, 3.1 mM, 3.2 mM, 3.3 mM, 3.4 mM, 3.5 mM, 3.6 mM, 3.7 mM, 3.8 mM, 3.9 mM, 4 mM, 4.1 mM, 4.2 mM, 4.3 mM, 4.4 mM, 4.5 mM, 4.6 mM, 4.7 mM, 4.8 mM, 4.9 mM, 5 mM, 5.1 mM, 5.2 mM, 5.3 mM, 5.4 mM, 5.5 mM, 5.6 mM, 5.7 mM, 5.8 mM, 5.9 mM, 6 mM, 6.1 mM, 6.2 mM, 6.3 mM, 6.4 mM, 6.5 mM, 6.6 mM, 6.7 mM, 6.8 mM, 6.9 mM, 7 mM, 7.1 mM, 7.2 mM, 7.3 mM, 7.4 mM, 7.5 mM, 7.6 mM, 7.7 mM, 7.8 mM, 7.9 mM, 8 mM, 8.1 mM, 8.2 mM, 8.3 mM, 8.4 mM, 8.5 mM, 8.6 mM, 8.7 mM, 8.8 mM, 8.9 mM, 9 mM, 9.1 mM, 9.2 mM, 9.3 mM, 9.4 mM, 9.5 mM, 9.6 mM, 9.7 mM, 9.8 mM, 9.9 mM, 10 mM, 10.1 mM, 10.2 mM, 10.3 mM, 10.4 mM, 10.5 mM, 10.6 mM, 10.7 mM, 10.8 mM, 10.9 mM, 11 mM, 11.1 mM, 11.2 mM, 11.3 mM, 11.4 mM, 11.5 mM, 11.6 mM, 11.7 mM, 11.8 mM, 11.9 mM, 12 mM, 12.1 mM, 12.2 mM, 12.3 mM, 12.4 mM, 12.5 mM, 12.6 mM, 12.7 mM, 12.8 mM, 12.9 mM, 13 mM, 13.1 mM, 13.2 mM, 13.3 mM, 13.4 mM, 13.5 mM, 13.6 mM, 13.7 mM, 13.8 mM, 13.9 mM, 14 mM, 14.1 mM, 14.2 mM, 14.3 mM, 14.4 mM, 14.5 mM, 14.6 mM, 14.7 mM, 14.8 mM, 14.9 mM or 15 mM.

[0602] The formulation may comprise hydrochloric acid in a range of 0-0.5 mM, 0.1-0.6 mM, 0.2-0.7 mM, 0.3-0.8 mM, 0.4-0.9 mM, 0.5-1 mM, 0.6-1.1 mM, 0.7-1.2 mM, 0.8-1.3 mM, 0.9-1.4 mM, 1-1.5 mM, 1.1-1.6 mM, 1.2-1.7 mM, 1.3-1.8 mM, 1.4-1.9 mM, 1.5-2 mM, 1.6-2.1 mM, 1.7-2.2 mM, 1.8-2.3 mM, 1.9-2.4 mM, 2-2.5 mM, 2.1-2.6 mM, 2.2-2.7 mM, 2.3-2.8 mM, 2.4-2.9 mM, 2.5-3 mM, 2.6-3.1 mM, 2.7-3.2 mM, 2.8-3.3 mM, 2.9-3.4 mM, 3-3.5 mM, 3.1-3.6 mM, 3.2-3.7 mM, 3.3-3.8 mM, 3.4-3.9 mM, 3.5-4 mM, 3.6-4.1 mM, 3.7-4.2 mM, 3.8-4.3 mM, 3.9-4.4 mM, 4-4.5 mM, 4.1-4.6 mM, 4.2-4.7 mM, 4.3-4.8 mM, 4.4-4.9 mM, 4.5-5 mM, 4.6-5.1 mM, 4.7-5.2 mM, 4.8-5.3 mM, 4.9-5.4 mM, 5-5.5 mM, 5.1-5.6 mM, 5.2-5.7 mM, 5.3-5.8 mM, 5.4-5.9 mM, 5.5-6 mM, 5.6-6.1 mM, 5.7-6.2 mM, 5.8-6.3 mM, 5.9-6.4 mM, 6-6.5 mM, 6.1-6.6 mM, 6.2-6.7 mM, 6.3-6.8 mM, 6.4-6.9 mM, 6.5-7 mM, 6.6-7.1 mM, 6.7-7.2 mM, 6.8-7.3 mM, 6.9-7.4 mM, 7-7.5 mM, 7.1-7.6 mM, 7.2-7.7 mM, 7.3-7.8 mM, 7.4-7.9 mM, 7.5-8 mM, 7.6-8.1 mM, 7.7-8.2 mM, 7.8-8.3 mM, 7.9-8.4 mM, 8-8.5 mM, 8.1-8.6 mM, 8.2-8.7 mM, 8.3-8.8 mM, 8.4-8.9 mM, 8.5-9 mM, 8.6-9.1 mM, 8.7-9.2 mM, 8.8-9.3 mM, 8.9-9.4 mM, 9-9.5 mM, 9.1-9.6 mM, 9.2-9.7 mM, 9.3-9.8 mM, 9.4-9.9 mM, 9.5-10 mM, 9.6-10.1 mM, 9.7-10.2 mM, 9.8-10.3 mM, 9.9-10.4 mM, 10-10.5 mM, 10.1-10.6 mM, 10.2-10.7 mM, 10.3-10.8 mM, 10.4-10.9 mM, 10.5-11 mM, 10.6-11.1 mM, 10.7-11.2 mM, 10.8-11.3 mM, 10.9-11.4 mM, 11-11.5 mM, 11.1-11.6 mM, 11.2-11.7 mM, 11.3-11.8 mM, 11.4-11.9 mM, 11.5-12 mM, 11.6-12.1 mM, 11.7-12.2 mM, 11.8-12.3 mM, 11.9-12.4 mM, 12-12.5 mM, 12.1-12.6 mM, 12.2-12.7 mM, 12.3-12.8 mM, 12.4-12.9 mM, 12.5-13 mM, 12.6-13.1 mM, 12.7-13.2 mM, 12.8-13.3 mM, 12.9-13.4 mM, 13-13.5 mM, 13.1-13.6 mM, 13.2-13.7 mM, 13.3-13.8 mM, 13.4-13.9 mM, 13.5-14 mM, 13.6-14.1 mM, 13.7-14.2 mM, 13.8-14.3 mM, 13.9-14.4 mM, 14-14.5 mM, 14.1-14.6 mM, 14.2-14.7 mM, 14.3-14.8 mM, 14.4-14.9 mM, 14.5-15 mM, 0-1 mM, 1-2 mM, 2-3 mM, 3-4 mM, 4-5 mM, 5-6 mM, 6-7 mM, 7-8 mM, 8-9 mM, 9-10 mM, 10-11 mM, 11-12 mM, 12-13 mM, 13-14 mM, 14-15 mM, 15-16 mM, 0-2 mM, 1-3 mM, 2-4 mM, 3-5 mM, 4-6 mM, 5-7 mM, 6-8 mM, 7-9 mM, 8-10 mM, 9-11 mM, 10-12 mM, 11-13 mM, 12-14 mM, 13-15 mM, 0-3 mM, 1-4 mM, 2-5 mM, 3-6 mM, 4-7 mM, 5-8 mM, 6-9 mM, 7-10 mM, 8-11 mM, 9-12 mM, 10-13 mM, 11-14 mM, 12-15 mM, 0-4 mM, 1-5 mM, 2-6 mM, 3-7 mM, 4-8 mM, 5-9 mM, 6-10 mM, 7-11 mM, 8-12 mM, 9-13 mM, 10-14 mM, 11-15 mM, 0-5 mM, 1-6 mM, 2-7 mM, 3-8 mM, 4-9 mM, 5-10 mM, 6-11 mM, 7-12 mM, 8-13 mM, 9-14 mM, 10-15 mM, 0-6 mM, 1-7 mM, 2-8 mM, 3-9 mM, 4-10 mM, 5-11 mM, 6-12 mM, 7-13 mM, 8-14 mM, 9-15 mM, 0-7 mM, 1-8 mM, 2-9 mM, 3-10 mM, 4-11 mM, 5-12 mM, 6-13 mM, 7-14 mM, 8-15 mM, 0-8 mM, 1-9 mM, 2-10 mM, 3-11 mM, 4-12 mM, 5-13 mM, 6-14 mM, 7-15 mM, 0-9 mM, 1-10 mM, 2-11 mM, 3-12 mM, 4-13 mM, 5-14 mM, 6-15 mM, 0-10 mM, 1-11 mM, 2-12 mM, 3-13 mM, 4-14 mM, 5-15 mM, 0-11 mM, 1-12 mM, 2-13 mM, 3-14 mM, 4-15 mM, 0-12 mM, 1-13 mM, 2-14 mM, 3-15 mM, 0-13 mM, 1-14 mM, 2-15 mM, 0-14 mM, 1-15 mM, or 0-15 mM.

### Sugar

[0603] In certain embodiments, the formulation may comprise at least one sugar and/or sugar substitute.

[0604] In certain embodiments, the formulation may comprise at least one sugar and/or sugar substitute to increase the stability of the formulation. This increase in stability may provide longer hold times for in-process pools, provide a longer “shelf-life”, increase the concentration of AAV particles in solution (e.g., the formulation is able to have higher concentrations of AAV particles without rAAV dropping out of the solution) and/or reduce the generation or formation of aggregation in the formulations.

[0605] In certain embodiments, the formulation may comprise 0-10% w/v of a sugar and/or sugar substitute.

[0606] In certain embodiments, the formulation may comprise 0-9% w/v of a sugar and/or sugar substitute.

[0607] In certain embodiments, the formulation may comprise 1% w/v of a sugar and/or sugar substitute.

[0608] In certain embodiments, the formulation may comprise 2% w/v of a sugar and/or sugar substitute.

[0609] In certain embodiments, the formulation may comprise 3% w/v of a sugar and/or sugar substitute.

[0610] In certain embodiments, the formulation may comprise 4% w/v of a sugar and/or sugar substitute.

[0611] In certain embodiments, the formulation may comprise 5% w/v of a sugar and/or sugar substitute.

[0612] In certain embodiments, the formulation may comprise 6% w/v of a sugar and/or sugar substitute.

[0613] In certain embodiments, the formulation may comprise 7% w/v of a sugar and/or sugar substitute.

[0614] In certain embodiments, the formulation may comprise 8% w/v of a sugar and/or sugar substitute.

[0615] In certain embodiments, the formulation may comprise 9% w/v of a sugar and/or sugar substitute.

[0616] In certain embodiments, the formulation may comprise 10% w/v of a sugar and/or sugar substitute.

[0617] In certain embodiments, formulations of pharmaceutical compositions described herein may comprise a disaccharide. Suitable disaccharides that may be used in the formulation described herein may comprise sucrose, lactulose, lactose, maltose, trehalose, cellobiose, chitobiose, kojibiose, nigerose, isomaltose, β,β-trehalose, α,β-trehalose, sophorose, laminaribiose, gentiobiose, turanose, maltulose, palatinose, gentiobiulose, mannobiose, melibiose, melibiulose, rutinose, rutinulose, and xylobiose. The concentration of disaccharide (w/v) used in the formulation may be between 1%-15%, for example, between 1%-5%, between 3%-6%, between 5%-8%, between 7%-10%, or between 10%-15%.

[0618] In certain embodiments, formulations of pharmaceutical compositions described herein may comprise a sugar alcohol. As a non-limiting example, the sugar alcohol that may be used in the formulation described herein may comprise sorbitol. The concentration of sugar alcohol (w/v) used in the formulation may be between 1%-15%, for example, between 1%-5%, between 3%-6%, between 5%-8%, between 7%-10%, or between 10%-15%.

### Surfactant

[0619] In certain embodiments, formulations of pharmaceutical compositions described herein may comprise a surfactant. Surfactants may help control shear forces in suspension cultures. Surfactants used herein may be anionic, zwitterionic, or non-ionic surfactants and may comprise those known in the art that are suitable for use in pharmaceutical formulations.

[0620] Examples of anionic surfactants comprise, but are not limited to, sulfate, sulfonate, phosphate esters, and carboxylates.

[0621] Examples of nonionic surfactants comprise, but are not limited to, ethoxylates, fatty alcohol ethoxylates, alkylphenol ethoxylates (e.g., nonoxynols, Triton X-100), fatty acid ethoxylates, ethoxylated amines and/or fatty acid amides (e.g., polyethoxylated tallow amine, cocamide monoethanolamine, cocamide diethanolamine), ethylene oxide/propylene oxide copolymer (e.g., Poloxamers such as Pluronic® F-68 or F-127), esters of fatty acids and polyhydric alcohols, fatty acid alkanolamides, ethoxylated aliphatic acids, ethoxylated aliphatic alcohols, ethoxylated sorbitol fatty acid esters, ethoxylated glycerides, ethoxylated block copolymers with EDTA (ethylene diaminetetraacetic acid), ethoxylated cyclic ether adducts, ethoxylated amide and imidazoline adducts, ethoxylated amine adducts, ethoxylated mercaptan adducts, ethoxylated condensates with alkyl phenols, ethoxylated nitrogen-based hydrophobes, ethoxylated polyoxypropylenes, polymeric silicones, fluorinated surfactants, and polymerizable surfactants.

[0622] Examples of zwitterionic surfactants comprise, but are not limited to, alkylamido betaines and amine oxides thereof, alkyl betaines and amine oxides thereof, sulfo betaines, hydroxy sulfo betaines, amphoglycinates, amphopropionates, balanced amphopoly-carboxyglycinates, and alkyl polyaminoglycinates. Proteins have the ability of being charged or uncharged depending on the pH; thus, at the right pH, a protein, preferably with a pI of about 8 to 9, such as modified Bovine Serum Albumin or chymotrypsinogen, could function as a zwitterionic surfactant. Various mixtures of surfactants can be used if desired.

### Formulation Properties

[0623] In certain embodiments, the formulation has been optimized to have a specific pH, osmolality, concentration, concentration of AAV particle, and/or total dose of AAV particle.

pH

[0624] In certain embodiments, the formulation may be optimized for a specific pH. In certain embodiments, the formulation may comprise a pH buffering agent (also referred to herein as “buffering agent”) which is a weak acid or base that, when used in the formulation, maintains the pH of the formulation near a chosen value even after another acid or base is added to the formulation. The pH of the formulation may be, but is not limited, to 0, 0.1, 0.2, 0.3, 0.4, 0.5, 0.6, 0.7, 0.8, 0.9, 1, 1.1, 1.2, 1.3, 1.4, 1.5, 1.6, 1.7, 1.8, 1.9, 2, 2.1, 2.2, 2.3, 2.4, 2.5, 2.6, 2.7, 2.8, 2.9, 3, 3.1, 3.2, 3.3, 3.4, 3.5, 3.6, 3.7, 3.8, 3.9, 4, 4.1, 4.2, 4.3, 4.4, 4.5, 4.6, 4.7, 4.8, 4.9, 5, 5.1, 5.2, 5.3, 5.4, 5.5, 5.6, 5.7, 5.8, 5.9, 6, 6.1, 6.2, 6.3, 6.4, 6.5, 6.6, 6.7, 6.8, 6.9, 7, 7.1, 7.2, 7.3, 7.4, 7.5, 7.6, 7.7, 7.8, 7.9, 8, 8.1, 8.2, 8.3, 8.4, 8.5, 8.6, 8.7, 8.8, 8.9, 9, 9.1, 9.2, 9.3, 9.4, 9.5, 9.6, 9.7, 9.8, 9.9, 10, 10.1, 10.2, 10.3, 10.4, 10.5, 10.6, 10.7, 10.8, 10.9, 11, 11.1, 11.2, 11.3, 11.4, 11.5, 11.6, 11.7, 11.8, 11.9, 12, 12.1, 12.2, 12.3, 12.4, 12.5, 12.6, 12.7, 12.8, 12.9, 13, 13.1, 13.2, 13.3, 13.4, 13.5, 13.6, 13.7, 13.8, 13.9, and 14.

[0625] In certain embodiments, the formulation may be optimized for a specific pH range. The pH range may be, but is not limited to, 0-4, 1-5, 2-6, 3-7, 4-8, 5-9, 6-10, 7-11, 8-12, 9-13, 10-14, 0-1.5, 1-2.5, 2-3.5, 3-4.5, 4-5.5, 5-6.5, 6-7.5, 7-8.5, 8-9.5, 9-10.5, 10-11.5, 11-12.5, 12-13.5, 0-1, 1-2, 2-3, 3-4, 4-5, 5-6, 6-7, 7-8, 8-9, 9-10, 10-11, 11-12, 12-13, 13-14, 0-0.5, 0.5-1, 1-1.5, 1.5-2, 2-2.5, 2.5-3, 3-3.5, 3.5-4, 4-4.5, 4.5-5, 5-5.5, 5.5-6, 6-6.5, 6.5-7, 7-7.5, 7.2-8.2, 7.2-7.6, 7.3-7.7, 7.5-8, 7.8-8.2, 8-8.5, 8.5-9, 9-9.5, 9.5-10, 10-10.5, 10.5-11, 11-11.5, 11.5-12, 12-12.5, 12.5-13, 13-13.5, or 13.5-14.

[0626] In certain embodiments, the pH of the formulation is between 6 and 8.5.

[0627] In certain embodiments, the pH of the formulation is between 7 and 7.6.

[0628] In certain embodiments, the pH of the formulation is about 7.3.

[0629] In certain embodiments, the pH is determined when the formulation is at 5° C.

[0630] In certain embodiments, the pH is determined when the formulation is at 25° C.

[0631] Suitable buffering agents may comprise, but not limited to, Tris HCl, Tris base, sodium phosphate (monosodium phosphate and/or disodium phosphate), potassium phosphate (monopotassium phosphate and/or dipotassium phosphate), histidine, boric acid, citric acid, glycine, HEPES (4-(2-hydroxyethyl)-1-piperazineethanesulfonic acid), and MOPS (3-(N-morpholino) propanesulfonic acid).

[0632] Concentration of buffering agents in the formulation may be between 1-50 mM, between 1-25 mM, between 5-30 mM, between 5-20 mM, between 5-15 mM, between 10-40 mM, or between 15-30 mM. Concentration of buffering agents in the formulation may be about 1 mM, 5 mM, 7.5 mM, 10 mM, 12.5 mM, 15 mM, 20 mM, 25 mM, 30 mM, 35 mM, 40 mM, or 50 mM.

[0633] In certain embodiments, the formulation may comprise, but is not limited to, phosphate-buffered saline (PBS). As a non-limiting example, the PBS may comprise sodium chloride, potassium chloride, disodium phosphate, monopotassium phosphate, and distilled water. In some instances, the PBS does not contain potassium or magnesium. In other instances, the PBS contains calcium and magnesium.

[0634] In certain embodiments, buffering agents used in the formulations of pharmaceutical compositions described herein may comprise sodium phosphate (monosodium phosphate and/or disodium phosphate). As a non-limiting example, sodium phosphate may be adjusted to a pH (at 5° C.) within the range of 7.4±0.2. In certain embodiments, buffering agents used in the formulations of pharmaceutical compositions described herein may comprise Tris base. Tris base may be adjusted with hydrochloric acid to any pH within the range of 7.1 and 9.1. As a non-limiting example, Tris base used in the formulations described herein may be adjusted to 8.0±0.2. As a non-limiting example, Tris base used in the formulations described herein may be adjusted to 7.5±0.2.

### Osmolality

[0635] In certain embodiments, the formulation may be optimized for a specific osmolality. The osmolality of the formulation may be, but is not limited to, 300, 310, 320, 330, 340, 350, 351, 352, 353, 354, 355, 356, 357, 358, 359, 360, 361, 362, 363, 364, 365, 366, 367, 368, 369, 370, 371, 372, 373, 374, 375, 376, 377, 378, 379, 380, 381, 382, 383, 384, 385, 386, 387, 388, 389, 390, 391, 392, 393, 394, 395, 396, 397, 398, 399, 400, 401, 402, 403, 404, 405, 406, 407, 408, 409, 410, 411, 412, 413, 414, 415, 416, 417, 418, 419, 420, 421, 422, 423, 424, 425, 426, 427, 428, 429, 430, 431, 432, 433, 434, 435, 436, 437, 438, 439, 440, 441, 442, 443, 444, 445, 446, 447, 448, 449, 450, 451, 452, 453, 454, 455, 456, 457, 458, 459, 460, 461, 462, 463, 464, 465, 466, 467, 468, 469, 470, 471, 472, 473, 474, 475, 476, 477, 478, 479, 480, 481, 482, 483, 484, 485, 486, 487, 488, 489, 490, 491, 492, 493, 494, 495, 496, 497, 498, 499, or 500 mOsm/kg (milliosmoles/kg).

[0636] In certain embodiments, the formulation may be optimized for a specific range of osmolality. The range may be, but is not limited to, 300-400, 350-360, 360-370, 370-380, 380-390, 390-400, 400-410, 410-420, 420-430, 430-440, 440-450, 450-460, 460-470, 470-480, 480-490, 490-500, 350-370, 360-380, 370-390, 380-400, 390-410, 400-420, 410-430, 420-440, 430-450, 440-460, 450-470, 460-480, 470-490, 480-500, 350-375, 375-400, 400-425, 425-450, 450-475, 475-500, 350-380, 360-390, 370-400, 380-410, 390-420, 400-430, 410-440, 420-450, 430-460, 440-470, 450-480, 460-490, 470-500, 350-390, 360-400, 370-410, 380-420, 390-430, 400-440, 410-450, 420-460, 430-470, 440-480, 450-490, 460-500, 350-400, 360-410, 370-420, 380-430, 390-440, 400-450, 410-460, 420-470, 430-480, 440-490, 450-500, 350-410, 360-420, 370-430, 380-440, 390-450, 400-460, 410-470, 420-480, 430-490, 440-500, 350-420, 360-430, 370-440, 380-450, 390-460, 400-470, 410-480, 420-490, 430-500, 350-430, 360-440, 370-450, 380-460, 390-470, 400-480, 410-490, 420-500, 350-440, 360-450, 370-460, 380-470, 390-480, 400-490, 410-500, 350-450, 360-460, 370-470, 380-480, 390-490, 400-500, 350-460, 360-470, 370-480, 380-490, 390-500, 350-470, 360-480, 370-490, 380-500, 350-480, 360-490, 370-500, 350-490, 360-500, or 350-500 mOsm/kg.

[0637] In certain embodiments, the osmolality of the formulation is between 300-400 mOsm/kg.

[0638] In certain embodiments, the osmolality of the formulation is between 350-500 mOsm/kg.

[0639] In certain embodiments, the osmolality of the formulation is between 400-500 mOsm/kg

[0640] In certain embodiments, the osmolality of the formulation is between 400-480 mOsm/kg.

### Concentration of AAV Particle

[0641] In certain embodiments, the concentration of AAV particle in the formulation may be between about 1×10⁶ VG/ml and about 1×10¹⁶ VG/ml. As used herein, “VG/ml” represents vector genomes (VG) per milliliter (ml). VG/ml also may describe genome copy per milliliter or DNase resistant particle per milliliter.

[0642] In certain embodiments, the formulation may comprise an AAV particle concentration of about 1×10⁶, 2×10⁶, 3×10⁶, 4×10⁶, 5×10⁶, 6×10⁶, 7×10⁶, 8×10⁶, 9×10⁶, 1×10⁷, 2×10⁷, 3×10⁷, 4×10⁷, 5×10⁷, 6×10⁷, 7×10⁷, 8×10⁷, 9×10⁷, 1×10⁸, 2×10⁸, 3×10⁸, 4×10⁸, 5×10⁸, 6×10⁸, 7×10⁸, 8×10⁸, 9×10⁸, 1×10⁹, 2×10⁹, 3×10⁹, 4×10⁹, 5×10⁹, 6×10⁹, 7×10⁹, 8×10⁹, 9×10⁹, 1×10¹⁰, 2×10¹⁰, 3×10¹⁰, 4×10¹⁰, 5×10¹⁰, 6×10¹⁰, 7×10¹⁰, 8×10¹⁰, 9×10¹⁰, 1×10¹¹, 2×10¹¹, 2.1×10¹¹, 2.2×10¹¹, 2.3×10¹¹, 2.4×10¹¹, 2.5×10¹¹, 2.6×10¹¹, 2.7×10¹¹, 2.8×10¹¹, 2.9×10¹¹, 3×10¹¹, 4×10¹¹, 5×10¹¹, 6×10¹¹, 7×10¹¹, 7.1×10¹¹, 7.2×10¹¹, 7.3×10¹¹, 7.4×10¹¹, 7.5×10¹¹, 7.6×10¹¹, 7.7×10¹¹, 7.8×10¹¹, 7.9×10¹¹, 8×10¹¹, 9×10¹¹, 1×10¹², 1.1×10¹², 1.2×10¹², 1.3×10¹², 1.4×10¹², 1.5×10¹², 1.6×10¹², 1.7×10¹², 1.8×10¹², 1.9×10¹², 2×10¹², 2.1×10¹², 2.2×10¹², 2.3×10¹², 2.4×10¹², 2.5×10¹², 2.6×10¹², 2.7×10¹², 2.8×10¹², 2.9×10¹², 3×10¹², 4×10¹², 4.1×10¹², 4.2×10¹², 4.3×10¹², 4.4×10¹², 4.5×10¹²,4.6×10¹², 4.7×10¹², 4.8×10¹², 4.9×10¹², 5×10¹², 6×10¹², 7×10¹², 7.1×10¹², 7.2×10¹², 7.3×10¹², 7.4×10¹², 7.5×10¹², 7.6×10¹², 7.7×10¹², 7.8×10¹², 7.9×10¹², 8×10¹², 8.1×10¹², 8.2×10¹², 8.3×10¹², 8.4×10¹², 8.5×10¹², 8.6×10¹², 8.7×10¹², 8.8×10¹², 8.9×10¹², 9×10¹², 1×10¹³, 1.1×10¹³, 1.2×10¹³, 1.3×10¹³, 1.4×10¹³, 1.5×10¹³, 1.6×10¹³, 1.7×10¹³, 1.8×10¹³, 1.9×10¹³, 2×10¹³, 2.1×10¹³, 2.2×10¹³, 2.3×10¹³, 2.4×10¹³, 2.5×10¹³, 2.6×10¹³, 2.7×10¹³, 2.8×10¹³, 2.9×10¹³, 3×10¹³, 3.1×10¹³, 3.2×10¹³, 3.3×10¹³, 3.4×10¹³, 3.5×10¹³, 3.6×10¹³, 3.7×10¹³, 3.8×10¹³, 3.9×10¹³, 4×10¹³, 5×10¹³, 6×10¹³, 6.7×10¹³, 7×10¹³, 8×10¹³, 9×10¹³, 1×10¹⁴, 2×10¹⁴, 3×10¹⁴, 4×10¹⁴, 5×10¹⁴, 6×10¹⁴, 7×10¹⁴, 8×10¹⁴, 9×10¹⁴, 1×10¹⁵, 2×10¹⁵, 3×10¹⁵, 4×10¹⁵, 5×10¹⁵, 6×10¹⁵, 7×10¹⁵, 8×10¹⁵, 9×10¹⁵, or 1×10¹⁶ VG/ml.

[0643] In certain embodiments, the concentration of AAV particle in the formulation is between 1×10¹¹ and 5×10¹³, between 1×10¹² and 5×10¹², between 2×10¹² and 1×10¹³, between 5×10¹² and 1×10¹³, between 1×10¹³ and 2×10¹³, between 2×10¹³ and 3×10¹³, between 2×10¹³ and 2.5×10¹³, between 2.5×10¹³ and 3×10¹³, or no more than 5×10¹³ VG/ml.

[0644] In certain embodiments, the concentration of AAV particle in the formulation is 2.7×10¹¹ VG/ml.

[0645] In certain embodiments, the concentration of AAV particle in the formulation is 9×10¹¹ VG/ml.

[0646] In certain embodiments, the concentration of AAV particle in the formulation is 1.2×10¹² VG/ml.

[0647] In certain embodiments, the concentration of AAV particle in the formulation is 2.7×10¹² VG/ml.

[0648] In certain embodiments, the concentration of AAV particle in the formulation is 4×10¹² VG/ml.

[0649] In certain embodiments, the concentration of AAV particle in the formulation is 6×10¹² VG/ml.

[0650] In certain embodiments, the concentration of AAV particle in the formulation is 7.9×10¹² VG/ml.

[0651] In certain embodiments, the concentration of AAV particle in the formulation is 8×10¹² VG/ml.

[0652] In certain embodiments, the concentration of AAV particle in the formulation is 1×10¹³ VG/ml.

[0653] In certain embodiments, the concentration of AAV particle in the formulation is 1.8×10¹³ VG/ml.

[0654] In certain embodiments, the concentration of AAV particle in the formulation is 2.2×10¹³ VG/ml.

[0655] In certain embodiments, the concentration of AAV particle in the formulation is 2.7×10¹³ VG/ml.

[0656] In certain embodiments, the concentration of AAV particle in the formulation is 3.5×10¹³ VG/ml.

[0657] In certain embodiments, the concentration of AAV particle in the formulation is 2.7-3.5×10¹³ VG/ml.

[0658] In certain embodiments, the concentration of AAV particle in the formulation is 7.0×10¹³ VG/ml.

[0659] In certain embodiments, the concentration of AAV particle in the formulation is 5.0×10¹² VG/mL

[0660] In certain embodiments, the concentration of AAV particle in the formulation may be between about 1×10⁶ total capsid/mL and about 1×10¹⁶ total capsid/ml. In certain embodiments, delivery may comprise a composition concentration of about 1×10⁶, 2×10⁶, 3×10⁶, 4×10⁶, 5×10⁶, 6×10⁶, 7×10⁶, 8×10⁶, 9×10⁶, 1×10⁷, 2×10⁷, 3×10⁷, 4×10⁷, 5×10⁷, 6×10⁷, 7×10⁷, 8×10⁷, 9×10⁷, 1×10⁸, 2×10⁸, 3×10⁸, 4×10⁸, 5×10⁸, 6×10⁸, 7×10⁸, 8×10⁸, 9×10⁸, 1×10⁹, 2×10⁹, 3×10⁹, 4×10⁹, 5×10⁹, 6×10⁹, 7×10⁹, 8×10⁹, 9×10⁹, 1×10¹⁰, 2×10¹⁰, 3×10¹⁰, 4×10¹⁰, 5×10¹⁰, 6×10¹⁰, 7×10¹⁰, 8×10¹⁰, 9×10¹⁰, 1×10¹¹, 2×10¹¹, 3×10¹⁰, 4×10¹¹, 5×10¹¹, 6×10¹¹, 7×10¹¹, 8×10¹¹, 9×10¹¹, 1×10¹², 1.1×10¹², 1.2×10¹², 1.3×10¹², 1.4×10¹², 1.5×10¹², 1.6×10¹², 1.7×10¹², 1.8×10¹², 1.9×10¹², 2×10¹², 2.1×10¹², 2.2×10¹², 2.3×10¹², 2.4×10¹², 2.5×10¹², 2.6×10¹², 2.7×10¹², 2.8×10¹², 2.9×10¹², 3×10¹², 3.1×10¹², 3.2×10¹², 3.3×10¹², 3.4×10¹², 3.5×10¹², 3.6×10¹², 3.7×10¹², 3.8×10¹², 3.9×10¹², 4×10¹², 4.1×10¹², 4.2×10¹², 4.3×10¹², 4.4×10¹², 4.5×10¹², 4.6×10¹², 4.7×10¹², 4.8×10¹², 4.9×10¹², 5×10¹², 6×10¹², 7×10¹², 8×10¹², 9×10¹², 1×10¹³, 2×10¹³, 2.1×10¹³, 2.2×10¹³, 2.3×10¹³, 2.4×10¹³, 2.5×10¹³, 2.6×10¹³, 2.7×10¹³, 2.8×10¹³, 2.9×10¹³, 3×10¹³, 4×10¹³, 5×10¹³, 6×10¹³, 6.7×10¹³, 7×10¹³, 8×10¹³, 9×10¹³, 1×10¹⁴, 2×10¹⁴, 3×10¹⁴, 4×10¹⁴, 5×10¹⁴, 6×10¹⁴, 7×10¹⁴, 8×10¹⁴, 9×10¹⁴, 1×10¹⁵, 2×10¹⁵, 3×10¹⁵, 4×10¹⁵, 5×10¹⁵, 6×10¹⁵, 7×10¹⁵, 8×10¹⁵, 9×10¹⁵, or 1×10¹⁶ total capsid/ml. Total Dose of AAV particle

[0661] In certain embodiments, the total dose of the AAV particle in the formulation may be between about 1×10⁶ VG and about 1×10¹⁶ VG. In certain embodiments, the formulation may comprise a total dose of AAV particle of about 1×10⁶, 2×10⁶, 3×10⁶, 4×10⁶, 5×10⁶, 6×10⁶, 7×10⁶, 8×10⁶, 9×10⁶, 1×10⁷, 2×10⁷, 3×10⁷, 4×10⁷, 5×10⁷, 6×10⁷, 7×10⁷, 8×10⁷, 9×10⁷, 1×10⁸, 2×10⁸, 3×10⁸, 4×10⁸, 5×10⁸, 6×10⁸, 7×10⁸, 8×10⁸, 9×10⁸, 1×10⁹, 2×10⁹, 3×10⁹, 4×10⁹, 5×10⁹, 6×10⁹, 7×10⁹, 8×10⁹, 9×10⁹, 1×10¹⁰, 2×10¹⁰, 3×10¹⁰, 4×10¹⁰, 5×10¹⁰, 6×10¹⁰, 7×10¹⁰, 8×10¹⁰, 9×10¹⁰, 1×10¹¹, 2×10¹¹, 2.1×10¹¹, 2.2×10¹¹, 2.3×10¹¹, 2.4×10¹¹, 2.5×10¹¹, 2.6×10¹¹, 2.7×10¹¹, 2.8×10¹¹, 2.9×10¹¹, 3×10¹¹, 4×10¹¹, 5×10¹¹, 6×10¹¹, 7×10¹¹, 7.1×10¹¹, 7.2×10¹¹, 7.3×10¹¹, 7.4×10¹¹, 7.5×10¹¹, 7.6×10¹¹, 7.7×10¹¹, 7.8×10¹¹, 7.9×10¹¹, 8×10¹¹, 9×10¹¹, 1×10¹², 1.1×10¹², 1.2×10¹², 1.3×10¹², 1.4×10¹², 1.5×10¹², 1.6×10¹², 1.7×10¹², 1.8×10¹², 1.9×10¹², 2×10¹², 2.1×10¹², 2.2×10¹², 2.3×10¹², 2.4×10¹², 2.5×10¹², 2.6×10¹², 2.7×10¹², 2.8×10¹², 2.9×10¹², 3×10¹², 4×10¹², 4.1×10¹², 4.2×10¹², 4.3×10¹², 4.4×10¹², 4.5×10¹²,4.6×10¹², 4.7×10¹², 4.8×10¹², 4.9×10¹², 5×10¹², 6×10¹², 7×10¹², 7.1×10¹², 7.2×10¹², 7.3×10¹², 7.4×10¹², 7.5×10¹², 7.6×10¹², 7.7×10¹², 7.8×10¹², 7.9×10¹², 8×10¹², 8.1×10¹², 8.2×10¹², 8.3×10¹², 8.4×10¹², 8.5×10¹², 8.6×10¹², 8.7×10¹², 8.8×10¹², 8.9×10¹², 9×10¹², 1×10¹³, 1.1×10¹³, 1.2×10¹³, 1.3×10¹³, 1.4×10¹³, 1.5×10¹³, 1.6×10¹³, 1.7×10¹³, 1.8×10¹³, 1.9×10¹³, 2×10¹³, 2.1×10¹³, 2.2×10¹³, 2.3×10¹³, 2.4×10¹³, 2.5×10¹³, 2.6×10¹³, 2.7×10¹³, 2.8×10¹³, 2.9×10¹³, 3×10¹³, 3.1×10¹³, 3.2×10¹³, 3.3×10¹³, 3.4×10¹³, 3.5×10¹³, 3.6×10¹³, 3.7×10¹³, 3.8×10¹³, 3.9×10¹³, 4×10¹³, 5×10¹³, 6×10¹³, 6.7×10¹³, 7×10¹³, 8×10¹³, 9×10¹³, 1×10¹⁴, 2×10¹⁴, 3×10¹⁴, 4×10¹⁴, 5×10¹⁴, 6×10¹⁴, 7×10¹⁴, 8×10¹⁴, 9×10¹⁴, 1×10¹⁵, 2×10¹⁵, 3×10¹⁵, 4×10¹⁵, 5×10¹⁵, 6×10¹⁵, 7×10¹⁵, 8×10¹⁵, 9×10¹⁵, or 1×10¹⁶ VG.

[0662] In certain embodiments, the total dose of AAV particle in the formulation is between 1×10¹¹ and 5×10¹³ VG.

[0663] In certain embodiments, the total dose of AAV particle in the formulation is between 1×10¹¹ and 2×10¹⁴ VG.

[0664] In certain embodiments, the total dose of AAV particle in the formulation is 1.4×10¹¹ VG.

[0665] In certain embodiments, the total dose of AAV particle in the formulation is 4.5×10¹¹ VG.

[0666] In certain embodiments, the total dose of AAV particle in the formulation is 6.8×10¹¹ VG.

[0667] In certain embodiments, the total dose of AAV particle in the formulation is 1.4×10¹² VG.

[0668] In certain embodiments, the total dose of AAV particle in the formulation is 2.2×10¹² VG.

[0669] In certain embodiments, the total dose of AAV particle in the formulation is 4.6×10¹¹ VG.

[0670] In certain embodiments, the total dose of AAV particle in the formulation is 9.2×10¹² VG.

[0671] In certain embodiments, the total dose of AAV particle in the formulation is 1.0×10¹³ VG.

[0672] In certain embodiments, the total dose of AAV particle in the formulation is 2.3×10¹³ VG.

### Exemplary Formulation

[0673] In some embodiments, AAV particles of the present disclosure may be formulated in a solution comprising 10 mM sodium phosphate, 180 mM sodium chloride, and 0.001% poloxamer 188 (e.g., at a solution pH of 7.3). In some embodiments, the methods and systems to prepare AAV particles of the present disclosure, including methods comprising one or more of the steps or systems described herein, produce AAV particles formulated in a solution comprising 10 mM sodium phosphate, 180 mM sodium chloride, and 0.001% poloxamer 188 (e.g., at a solution pH of 7.3).

[0674] In some embodiments, AAV particles of the present disclosure may be formulated in a solution comprising between about 5-15 mM sodium phosphate, between about 160-200 mM sodium chloride, and between about 0.001-0.01% poloxamer 188 (solution pH between 7.1-7.5). In some embodiments, the methods and systems to prepare AAV particles of the present disclosure, including methods comprising one or more of the steps or systems described herein, produce AAV particles formulated in a solution comprising between about 5-15 mM sodium phosphate, between about 160-200 mM sodium chloride, and between about 0.001-0.01% poloxamer 188 (solution pH between 7.1-7.5).

[0675] In certain embodiments, the formulation comprises components with the following CAS (Chemical Abstracts Services) Registry Numbers, 7647-14-15 (sodium chloride), 7782-85-6 (sodium phosphate dibasic, heptahydrate), 10049-21-5 (sodium phosphate monobasic, monohydrate), and 9003-11-6 (poloxamer 188).

### Injectable Formulations

[0676] In some embodiments, an injectable preparation is provided herein. Injectable preparations, for example, sterile injectable aqueous or oleaginous suspensions may be formulated according to the known art using suitable dispersing agents, wetting agents, and/or suspending agents. Sterile injectable preparations may be sterile injectable solutions, suspensions, and/or emulsions in nontoxic parenterally acceptable diluents and/or solvents, for example, as a solution in 1,3-butanediol. Among the acceptable vehicles and solvents that may be employed are water, Ringer's solution, U.S.P., and isotonic sodium chloride solution. Sterile, fixed oils are conventionally employed as a solvent or suspending medium. For this purpose, any bland fixed oil can be employed comprising synthetic mono- or diglycerides. Fatty acids such as oleic acid can be used in the preparation of injectables.

[0677] Injectable formulations may be sterilized, for example, by filtration through a bacterial-retaining filter, and/or by incorporating sterilizing agents in the form of sterile solid compositions which can be dissolved or dispersed in sterile water or other sterile injectable medium prior to use.

[0678] In some embodiments, in order to prolong the effect of active ingredients, it is often desirable to slow the absorption of active ingredients from subcutaneous or intramuscular injections. This may be accomplished by the use of liquid suspensions of crystalline or amorphous material with poor water solubility. The rate of absorption of active ingredients depends upon the rate of dissolution which, in turn, may depend upon crystal size and crystalline form. Alternatively, delayed absorption of a parenterally administered drug form is accomplished by dissolving or suspending the drug in an oil vehicle. Injectable depot forms are made by forming microencapsulated matrices of the drug in biodegradable polymers such as polylactide-polyglycolide. Depending upon the ratio of drug to polymer and the nature of the particular polymer employed, the rate of drug release can be controlled. Examples of other biodegradable polymers comprise poly(orthoesters) and poly(anhydrides). Depot injectable formulations are prepared by entrapping the drug in liposomes or microemulsions which are compatible with body tissues.

### Purity of Drug Substance

[0679] The viral particles disclosed herein (e.g., AAV2 comprising nucleic acid encoding for an AADC protein) may be produced in high yield with sufficient purity that they can be administered to a human subject, e.g., using the production methods discussed herein. In some embodiments, the viral vector is formulated in a composition at a concentration of between about 3.0×10¹² to about 5.0×10¹² vg/mL, e.g., about 5.0×10¹² vg/mL.

[0680] In some embodiments, empty viral capsids that do not contain nucleic acid material may be generated during the process of production process of the viral particles. Pharmaceutical compositions comprising low amounts of empty viral capsids may be advantageous, because they avoid exposing patients, e.g., infants, with immature immune systems to antigenic material (empty capsids, host cell protein, host cell DNA) unnecessarily without therapeutic benefit. In some embodiments, such pharmaceutical compositions may reduce potential infusion reactions or broader immune responses and may improve therapeutic efficacy. Empty viral particles may be separated from full viral particles. In some embodiments, empty viral particles may be separated from full viral particles by gradient centrifugation or ultracentrifugation. In some embodiments, the ratio of empty viral particles to full viral particles may be measured by, e.g., measuring UV absorbance. In some embodiments, the ratio of empty viral particles to full viral particles may be determined using a Beckmann Optima XL-A analytical ultracentrifuge.

[0681] In some embodiments, the pharmaceutical composition produced by methods described herein comprises less than 40%, 39%, 38%, 37%, 36%, 35%, 34%, 33%, 32%, 31%, 30%, 29%, 28%, 27%, 26%, 25%, 24%, 23%, 22%, 21%, 20%, 19%, 18%, 17%, 16%, 15%, 14%, 13%, 12%, 11%, 10%, 9%, 8%,7%, 6%, 5%, 4%, 3%,2%, 1%, or less of empty particles. In some embodiments, the pharmaceutical composition produced by methods described herein comprises less than 20% empty particles. In some embodiments, the pharmaceutical composition produced by methods described herein comprises less than 10% empty particles. In some embodiments, the low percentage or ratio of empty to full viral particles produced by methods described herein may provide treatment benefits and/or reduced adverse effects after administration to a patient.

[0682] In some embodiments, a pharmaceutical composition produced by methods described herein comprises a protein purity of greater than about 90%. In some embodiments, the pharmaceutical composition produced by methods described herein comprises less than 5% contamination of proteins unrelated to the drug product. In some embodiments, the protein purity of the composition may be determined by CE-SDS.

[0683] In some embodiments, host cell (e.g., Sf9) protein contaminants may be present in the drug substance pool or purified drug substance pool. In some embodiments, host cell (e.g., Sf9) protein contaminants are minimized using the methods described herein. In some embodiments, amount of residual host cell can be distinguished between the viral capsid proteins and the residual host cell proteins. In some embodiments, the amount of residual host cell proteins can be measured by size exclusion or ion exchange chromatography. In some embodiments, the amount of residual host cell proteins can be measured by western blot using host cell-specific antibodies. In some embodiments, the amount of residual host cell protein can be measured by enzyme-linked immunosorbent assay (ELISA). In some embodiments, the methods described herein provide improved host cell contaminant levels as compared to levels in prior methods.

[0684] In some embodiments, residual host cell (e.g., Sf9 cell) DNA may be present in the drug substance pool or purified drug substance pool. In some embodiments, baculoviral DNA contaminants may be present in the drug substance pool or purified drug substance pool. In some embodiments, DNA contaminants (e.g., residual host cell, e.g., Sf9, or baculoviral) are minimized using the methods described herein. In some embodiments, the level of DNA contaminant may be detected using any method known in the art. In some embodiments, the level of DNA contaminant may be detected by PCR. In some embodiments, the level of DNA contaminant may be detected by quantitative PCR (qPCR) with primers specific for host cell sequences. In some embodiments, the level of DNA contaminant may be detected by digital droplet PCR (ddPCR). In some embodiments, the methods described herein provide improved DNA contaminant levels as compared to levels in prior methods.

[0685] In some embodiments, a pharmaceutical composition produced by the methods described herein comprises less than 10 ng/mL Sf9 residual host protein contaminants. In some embodiments, a pharmaceutical composition produced by the methods described herein comprises less than 7 ng/mL Sf9 residual host protein contaminants. In some embodiments, a pharmaceutical composition produced by the methods described herein comprises less than 5 ng/mL Sf9 residual host protein contaminants. In some embodiments, a pharmaceutical composition produced by the methods described herein comprises less than 2 ng/mL Sf9 residual host protein contaminants. In some embodiments, a pharmaceutical composition produced by the methods described herein comprises less than 1 ng/mL Sf9 residual host protein contaminants. In some embodiments, a pharmaceutical composition produced by the methods described herein comprises less than 5 ng/mL residual baculoviral DNA contaminants. In some embodiments, a pharmaceutical composition produced by the methods described herein comprises less than 2 ng/mL residual baculoviral DNA contaminants. In some embodiments, a pharmaceutical composition produced by the methods described herein comprises less than 1 ng/mL residual baculoviral DNA contaminants.

[0686] In some embodiments, a pharmaceutical composition produced by the methods described herein comprises no detectable levels of replication-competent baculovirus. In some embodiments, levels of replication-competent baculovirus in the pharmaceutical composition may be detected using a plaque assay.

[0687] In some embodiments, a pharmaceutical composition produced by the methods described herein comprises endotoxin levels of less than or equal to about 5 EU/mL, less than about 1 EU/mL, less than about 0.75 EU/mL, less than about 0.5 EU/mL, less than about 0.4 EU/mL, less than about 0.35 EU/mL, less than about 0.3 EU/mL, less than about 0.25 EU/mL, less than about 0.2 EU/mL, less than about 0.15 EU/mL, less than about 0.1 EU/mL, less than about 0.05 EU/mL, or, less than about 0.02 EU/mL. Exemplary methods for determining the amount of endotoxin include a limulus amoebocyte lysate (LAL) test.

[0688] In some embodiments, a pharmaceutical composition disclosed herein comprises a genomic titer of greater than 3×10¹² vg/mL. In some embodiments, a pharmaceutical composition disclosed herein comprises a genomic titer of about 2.0×10¹² vg/mL to about 8×10¹² vg/mL. In some embodiments, genomic titer may be measured using droplet digital PCR (ddPCR) and/or quantitative PCR (qPCR).

[0689] In one embodiment, a pharmaceutical composition disclosed herein exhibits a bioburden of less than 10 CFU/mL. In one embodiment, a pharmaceutical composition disclosed herein exhibits a bioburden of less than 1 CFU/mL. In some embodiments, the bioburden of a pharmaceutical composition disclosed herein is in accordance with United States Pharmacopoiea (USP), e.g., USP <61>, the contents of which are incorporated herein by reference in its entirety.

[0690] In some embodiments, the osmolality of a pharmaceutical composition disclosed herein in accordance with USP, e.g., USP <785> (incorporated by reference in its entirety) specifying 300-400 mOsm/kg.

[0691] In some embodiments, the pharmaceutical composition contains fewer than 6000 particles that are greater than 10 μm per container. In some embodiments, the pharmaceutical composition contains fewer than 600 particles that are greater than 25 μm per container.

### IV. Administration and Dosing

### Administration

[0692] In certain embodiments, the AAV particle may be administered to a subject (e.g., to the CNS of a subject) in a therapeutically effective amount to reduce the symptoms of the disease of the central nervous system (e.g., Parkinson's Disease) of a subject (e.g., determined using a known evaluation method).

[0693] In certain embodiments, the AAV particles of the present disclosure (e.g., as produced according to the present disclosure) may be administered by any delivery route which results in a therapeutically effective outcome. These include, but are not limited to, enteral (into the intestine), gastroenteral, epidural (into the dura mater), oral (by way of the mouth), transdermal, intracerebral (into the cerebrum), intracerebroventricular (into the cerebral ventricles), sub-pial (between pia and CNS parenchyma), intracarotid arterial (into the intracarotid artery), epicutaneous (application onto the skin), intradermal, (into the skin itself), subcutaneous (under the skin), nasal administration (through the nose), intravenous (into a vein), intravenous bolus, intravenous drip, intra-arterial (into an artery), systemic, intramuscular (into a muscle), intracardiac (into the heart), intraosseous infusion (into the bone marrow), intrathecal (into the spinal canal), intraparenchymal (the body of a tissue or organ, e.g., brain, spinal cord, etc.), intraperitoneal, (infusion or injection into the peritoneum), intravesical infusion, intravitreal, (through the eye), intracavernous injection (into a pathologic cavity) intracavitary (into the base of the penis), intravaginal administration, intrauterine, extra-amniotic administration, transdermal (diffusion through the intact skin for systemic distribution), transmucosal (diffusion through a mucous membrane), transvaginal, insufflation (snorting), sublingual, sublabial, enema, eye drops (onto the conjunctiva), or in ear drops, auricular (in or by way of the ear), buccal (directed toward the cheek), conjunctival, cutaneous, dental (to a tooth or teeth), electro-osmosis, endocervical, endosinusial, endotracheal, extracorporeal, hemodialysis, infiltration, interstitial, intra-abdominal, intra-amniotic, intra-articular, intrabiliary, intrabronchial, intrabursal, intracartilaginous (within a cartilage), intracaudal (within the cauda equine), intracisternal (within the cistema magna cerebellomedularis), intracomeal (within the cornea), dental intracoronal, intracoronary (within the coronary arteries), intracorporus cavemosum (within the dilatable spaces of the corporus cavemosa of the penis), intradiscal (within a disc), intraductal (within a duct of a gland), intraduodenal (within the duodenum), intradural (within or beneath the dura), intraepidermal (to the epidermis), intraesophageal (to the esophagus), intragastric (within the stomach), intragingival (within the gingivae), intraileal (within the distal portion of the small intestine), intralesional (within or introduced directly to a localized lesion), intraluminal (within a lumen of a tube), intralymphatic (within the lymph), intramedullary (within the marrow cavity of a bone), intrameningeal (within the meninges), intramyocardial (within the myocardium), intraocular (within the eye), intraovarian (within the ovary), intrapericardial (within the pericardium), intrapleural (within the pleura), intraprostatic (within the prostate gland), intrapulmonary (within the lungs or its bronchi), intrasinal (within the nasal or periorbital sinuses), intraspinal (within the vertebral column), intrasynovial (within the synovial cavity of a joint), intratendinous (within a tendon), intratesticular (within the testicle), intrathecal (within the cerebrospinal fluid at any level of the cerebrospinal axis), intrathoracic (within the thorax), intratubular (within the tubules of an organ), intratumor (within a tumor), intratympanic (within the aurus media), intravascular (within a vessel or vessels), intraventricular (within a ventricle), iontophoresis (by means of electric current where ions of soluble salts migrate into the tissues of the body), irrigation (to bathe or flush open wounds or body cavities), laryngeal (directly upon the larynx), nasogastric (through the nose and into the stomach), occlusive dressing technique (topical route administration which is then covered by a dressing which occludes the area), ophthalmic (to the external eye), oropharyngeal (directly to the mouth and pharynx), parenteral, percutaneous, periarticular, peridural, perineural, periodontal, rectal, respiratory (within the respiratory tract by inhaling orally or nasally for local or systemic effect), retrobulbar (behind the pons or behind the eyeball), soft tissue, subarachnoid, subconjunctival, submucosal, topical, transplacental (through or across the placenta), transtracheal (through the wall of the trachea), transtympanic (across or through the tympanic cavity), ureteral (to the ureter), urethral (to the urethra), vaginal, caudal block, diagnostic, nerve block, biliary perfusion, cardiac perfusion, photopheresis and spinal.

[0694] In some embodiments, compositions may be administered in a way which allows them to cross the blood-brain barrier, vascular barrier, or other epithelial barrier. The AAV particles of the present disclosure may be administered in any suitable form, either as a liquid solution or suspension, as a solid form suitable for liquid solution or suspension in a liquid solution. The AAV particles may be formulated with any appropriate and pharmaceutically acceptable excipient.

[0695] In certain embodiments, the AAV particles of the present disclosure (e.g., as produced according to the present disclosure) may be administered intracranially. In certain embodiments, the AAV particles of the present disclosure (e.g., AAV2 particles) may be administered into the putamen of patients having a disease of the central nervous system (e.g., Parkinson's Disease).

[0696] In certain embodiments, the AAV particles of the present disclosure may be delivered to a subject via a single route administration.

[0697] In certain embodiments, the AAV particles of the present disclosure may be delivered to a subject via a multi-site route of administration. A subject may be administered at 2, 3, 4, 5 or more than 5 sites.

[0698] In certain embodiments, a subject may be administered the AAV particles of the present disclosure using a bolus infusion.

[0699] In certain embodiments, the AAV particles of the present disclosure may be administered via a single dose intravenous delivery. In certain embodiments, the single dose intravenous delivery may be a one-time treatment. In the context of diseases of the central nervous system (e.g., Parkinson's Disease), the single dose intravenous delivery can produce durable relief for subjects with central nervous system (e.g., Parkinson's Disease) and/or related symptoms. The relief may last for minutes such as, but not limited to, 1, 2, 3, 4, 5, 6, 7, 8, 9, 10, 11, 12, 13, 14, 15, 16, 17, 18, 19, 20, 21, 22, 23, 24, 25, 26, 27, 28, 29, 30, 31, 32, 33, 34, 35, 36, 37, 38, 39, 40, 41, 42, 43, 44, 45, 46, 47, 48, 49, 50, 51, 52, 53, 54, 55, 56, 57, 58, 59 minutes or more than 59 minutes; hours such as, but not limited to, 1, 2, 1, 2, 3, 4, 5, 6, 7, 8, 9, 10, 11, 12, 13, 14, 15, 16, 17, 18, 19, 20, 21, 22, 23, 24, 25, 26, 27, 28, 29, 30, 31, 32, 33, 34, 35, 36, 37, 38, 39, 40, 41, 42, 43, 44, 45, 46, 47, 48, or more than 48 hours; days such as, but not limited to, 1, 2, 3, 4, 5, 6, 7, 8, 9, 10, 11, 12, 13, 14, 15, 16, 17, 18, 19, 20, 21, 22, 23, 24, 25, 26, 27, 28, 29, 30, 31, or more than 31 days; weeks such as, but not limited to, 1, 2, 3, 4, 5, 6, 7, 8, 9, 10, 11, 12, 13, 14, 15, 16, or more than 16 weeks; months such as, but not limited to, 1, 2, 3, 4, 5, 6, 7, 8, 9, 10, 11, 12, 13, 14, 15, 16, 17, 18, 19, 20, 21, 22, 23, 24, or more than 24 months; years such as, but not limited to, 1, 2, 3, 4, 5, 6, 7, 8, 9, 10, 11, 12, 13, 14, 15, or more than 15 years.

[0700] In some embodiments, the AAV particles of the present disclosure may be administered by intrathecal injection. In certain embodiments, the AAV particles of the present disclosure may be administered by intrathecal injection.

[0701] In certain embodiments, the AAV particle may be administered to the cisterna magna in a therapeutically effective amount to transduce spinal cord motor neurons and/or astrocytes. In certain embodiments, the AAV particle may be administered intrathecally.

[0702] In certain embodiments, the AAV particle may be administered using intrathecal infusion in a therapeutically effective amount to transduce spinal cord motor neurons and/or astrocytes.

[0703] In certain embodiments, the AAV particle may be administered to the CNS in a therapeutically effective amount to improve function and/or survival for a subject with diseases of the central nervous system (e.g., Parkinson's Disease). In certain embodiments, the vector may be administered by direct infusion into the striatum.

[0704] The AAV particle may be administered in a “therapeutically effective” amount, i.e., an amount that is sufficient to alleviate and/or prevent at least one symptom associated with the disease, or provide improvement in the condition of the subject.

### Delivery to the Central Nervous System

[0705] In certain embodiments, delivery of the pharmaceutical compositions comprising AAV particles to cells of the central nervous system (e.g., parenchyma) comprises infusion of up to 1 mL. In certain embodiments, delivery of the pharmaceutical compositions comprising AAV particles to cells of the central nervous system (e.g., parenchyma) may comprise infusion of 0.1, 0.2, 0.3, 0.4, 0.5, 0.6, 0.7, 0.8, or 0.9 mL.

[0706] In certain embodiments, delivery of pharmaceutical composition comprising AAV particles to cells of the central nervous system (e.g., parenchyma) comprises infusion of between about 1 mL to about 120 mL. In certain embodiments, delivery of AAV particles to cells of the central nervous system (e.g., parenchyma) comprises infusion of at least 3 mL. In certain embodiments, delivery of AAV particles to cells of the central nervous system (e.g., parenchyma) consists of infusion of 3 mL. In certain embodiments, delivery of AAV particles to cells of the central nervous system (e.g., parenchyma) comprises infusion of at least 10 mL. In certain embodiments, delivery of AAV particles to cells of the central nervous system (e.g., parenchyma) consists of infusion of 10 mL.

[0707] In certain embodiments, a composition comprises at least one payload described herein (e.g., AADC, e.g., SEQ ID NO: 979) and the payloads are components of a viral genome packaged in an AAV particle. The percent (%) ratio of AAV particles comprising the payload (also referred to herein as full capsids) to the AAV particles without the payload (also referred to herein as empty capsids) in the composition may be 25:75, 30:70, 40:60, 50:50, 60:40, 70:30, or 75:25. In certain embodiments, the percent ratio of AAV particles comprising the payload to empty capsids is 60:40. In certain embodiments, the percent ratio of AAV particles comprising the payload to empty capsids is 70:30. In certain embodiments, the percent ratio of AAV particles comprising the payload to empty capsids is 85:15.

[0708] In certain embodiments, the composition comprises at least 50% AAV particles comprising the payload. In certain embodiments, the composition comprises at least 60% AAV particles comprising the payload. In certain embodiments, the composition comprises at least 70% AAV particles comprising the payload. In certain embodiments, the composition comprises at least 85% AAV particles comprising the payload. In certain embodiments, the composition comprises at least 99% AAV particles comprising the payload. In certain embodiments, the composition comprises 100% AAV particles comprising the payload.

[0709] In certain embodiments, the composition described herein comprises 60-70%, 60-80%, 60-90%, 60-99%, 60-100%, 70-80%, 70-90%, 70-99%, 70-100%, 80-85%, 80-90%, 80-95%, 80-99%, 80-100%, 90-95%, 90-99%, or 90-100% AAV particles comprising the payload. In certain embodiments, the composition described herein comprises 60-100% AAV particles comprising the payload.

[0710] In certain embodiments, the composition comprises less than 50% empty particles. In certain embodiments, the composition comprises less than 40% empty particles. In certain embodiments, the composition comprises less than 35% empty particles. In certain embodiments, the composition comprises less than 30% empty particles. In certain embodiments, the composition comprises less than 25% empty particles. In certain embodiments, the composition comprises less than 20% empty particles. In certain embodiments, the composition comprises less than 15% empty particles. In certain embodiments, the composition comprises less than 10% empty particles. In certain embodiments, the composition comprises less than 5% empty particles. In certain embodiments, the composition comprises less than 1% empty particles.

[0711] In certain embodiments, a subject who may be administered a dose of the AAV particles described herein may have advanced PD and still respond to levodopa therapy but the subject also experiences medically refractory motor complications (e.g., sever motor fluctuations and/or dyskinesias that occur during levodopa and other dopaminergic therapies despite adjustments in and optimization of medication). The subject may be healthy enough to undergo a neurosurgical procedure which may be determined by methods known in the art. In certain embodiments, the subject may meet the selection criteria for deep brain stimulation (DBS). The subject may have idiopathic PD, younger than 69 years of age, have pronounced responses to levodopa, have medication-refractory symptoms (e.g., motor fluctuation and/or dyskinesia) and/or have little or no cognitive dysfunction.

[0712] In certain embodiments, a subject who may be administered a dose of the AAV particles described herein may also suffer from dementia or cognitive impairment.

[0713] In certain embodiments, a subject who may be administered a dose of the AAV particles described herein may have been previously treated with the same or similar therapeutic. In another embodiment, a subject may have been treated with a therapeutic which has been shown to reduce the symptoms of Parkinson's Disease.

[0714] In certain embodiments, a subject may be administered a dose of the AAV particles described herein in combination with at least one other agent. In certain embodiments, the subject may be administered a dose of the AAV particles described herein in combination with Levodopa for treating and/or preventing Parkinson's Disease.

### V. Treatments

### General

[0715] The present disclosure provides a method for treating a disease, disorder and/or condition in a mammalian subject, comprising a human subject, comprising administering to the subject any of the viral particles or formulations described herein or administering to the subject any of the described compositions, comprising pharmaceutical compositions or formulations, described herein.

[0716] In certain embodiments, administration of the formulated AAV particles to a subject with not change the course of the underlying disease but will ameliorate symptoms in a subject.

[0717] In certain embodiments, the viral particles of the present disclosure are administered to a subject prophylactically.

[0718] In certain embodiments, the viral particles of the present disclosure are administered to a subject having at least one of the diseases described herein.

[0719] In certain embodiments, the viral particles of the present disclosure are administered to a subject to treat a disease or disorder described herein. The subject may have the disease or disorder or may be at-risk to developing the disease or disorder.

[0720] The present disclosure provides a method for administering to a subject in need thereof, comprising a human subject, a therapeutically effective amount of the AAV particles of the present disclosure to slow, stop or reverse disease progression. As a non-limiting example, disease progression may be measured by tests or diagnostic tool(s) known to those skilled in the art. As another non-limiting example, disease progression may be measured by change in the pathological features of the brain, CSF or other tissues of the subject.

[0721] In certain embodiments, various non-infectious diseases, e.g., neurological diseases, e.g., Parkinson's Disease, may be treated with pharmaceutical compositions of the present disclosure. AAV particles, especially blood brain barrier crossing AAV particles of the present disclosure, may be useful in treating various neurological diseases. In certain embodiments, neurological disorders treated according to the methods described herein comprise, but are not limited to Parkinson's Disease, Amyotrophic lateral sclerosis (ALS), Huntington's Disease (HD), and/or Friedreich's Ataxia (FA).

### Parkinson's Disease

[0722] In certain embodiments, recombinant AAVs of the present disclosure (e.g., as produced according to the present disclosure) are used for treating, preventing, and/or ameliorating one or more symptoms of Parkinson's disease. In certain embodiments the AAV particle used to treat Parkinson's disease comprises a payload such as, but not limited to, SEQ ID NO: 979 or a fragment or variant thereof. In some embodiments, the payload comprises SEQ ID NO: 979.

[0723] In certain embodiments, the subject is a human patient who has a minimum motor score of about 30 to a maximum score of about 100, about 10 to a maximum score of about 100, about 20 to a maximum score of about 100 in the Unified Parkinson's Disease Rating Scale.

[0724] In certain embodiments, the subject has been diagnosed with Parkinson's disease within the past 5 years prior to treatment with the compositions described herein. In certain embodiments, the subject may have been diagnosed with Parkinson's disease within a week, 2 weeks, 3 weeks, 4 weeks, 5 weeks, 6 weeks, 7 weeks, 8 weeks, 1 month, 2 months, 3 months, 4 months, 5 months, 6 months, 7 months, 8 months, 9 months, 10 months, 11 months, 12 months, 13 months, 14 months, 15 months, 16 months, 17 months, 18 months, 1 year, 2 years, 3 years, 4 years or less than 5 years prior to treatment with the compositions described herein.

[0725] In certain embodiments, the subject has been diagnosed with Parkinson's disease between 5 and 10 years prior to treatment with the compositions described herein. In certain embodiments, the subject may have been diagnosed with Parkinson's disease 5, 5.5., 6, 6.5, 7, 7.5, 8, 8.5, 9, 9.5 or 10 years prior to treatment with the compositions described herein.

[0726] In certain embodiments, the subject has been diagnosed with Parkinson's disease more than 10 years prior to treatment with the compositions described herein. In certain embodiments, the subject may have been diagnosed with Parkinson's disease 10.5, 11, 11.5, 12, 12.5, 13, 13.5, 14, 14.5, 15, 15.5, 16, 16.5, 17, 17.5, 18, 18.5, 19, 19.5, 20, 20.5, 21, 21.5, 22, 22.5, 23, 23.5, 24 or more than 24 years prior to treatment with the compositions described herein.

[0727] In certain embodiments, a subject is 50-65 years of age. In certain embodiments, the subject is 50, 51, 52, 53, 54, 55, 56, 57, 58, 59, 60, 61, 62, 63, 64, or 65 years of age. In certain embodiments, the subject is 50 years of age. In certain embodiments, the subject is 51 years of age. In certain embodiments, the subject is 52 years of age. In certain embodiments, the subject is 53 years of age. In certain embodiments, the subject is 54 years of age. In certain embodiments, the subject is 55 years of age. In certain embodiments, the subject is 56 years of age. In certain embodiments, the subject is 57 years of age. In certain embodiments, the subject is 58 years of age. In certain embodiments, the subject is 59 years of age. In certain embodiments, the subject is 60 years of age. In certain embodiments, the subject is 61 years of age. In certain embodiments, the subject is 62 years of age. In certain embodiments, the subject is 63 years of age. In certain embodiments, the subject is 64 years of age. In certain embodiments, the subject is 65 years of age.

[0728] In certain embodiments, a subject is 30 to 50 years of age. In certain embodiments, the subject is 30 years of age. In certain embodiments, the subject is 31 years of age. In certain embodiments, the subject is 32 years of age. In certain embodiments, the subject is 33 years of age. In certain embodiments, the subject is 34 years of age. In certain embodiments, the subject is 35 years of age. In certain embodiments, the subject is 36 years of age. In certain embodiments, the subject is 37 years of age. In certain embodiments, the subject is 38 years of age. In certain embodiments, the subject is 39 years of age. In certain embodiments, the subject is 40 years of age. In certain embodiments, the subject is 41 years of age. In certain embodiments, the subject is 42 years of age. In certain embodiments, the subject is 43 years of age. In certain embodiments, the subject is 44 years of age. In certain embodiments, the subject is 45 years of age. In certain embodiments, the subject is 46 years of age. In certain embodiments, the subject is 47 years of age. In certain embodiments, the subject is 48 years of age. In certain embodiments, the subject is 49 years of age. In certain embodiments, the subject is 50 years of age.

[0729] In certain embodiments, a subject is 65 to 85 years of age. In certain embodiments, the subject is 65 years of age. In certain embodiments, the subject is 66 years of age. In certain embodiments, the subject is 67 years of age. In certain embodiments, the subject is 68 years of age. In certain embodiments, the subject is 69 years of age. In certain embodiments, the subject is 70 years of age. In certain embodiments, the subject is 71 years of age. In certain embodiments, the subject is 72 years of age. In certain embodiments, the subject is 73 years of age. In certain embodiments, the subject is 74 years of age. In certain embodiments, the subject is 75 years of age. In certain embodiments, the subject is 76 years of age. In certain embodiments, the subject is 77 years of age. In certain embodiments, the subject is 78 years of age. In certain embodiments, the subject is 79 years of age. In certain embodiments, the subject is 80 years of age. In certain embodiments, the subject is 81 years of age. In certain embodiments, the subject is 82 years of age. In certain embodiments, the subject is 83 years of age. In certain embodiments, the subject is 84 years of age. In certain embodiments, the subject is 85 years of age.

[0730] In certain embodiments, a subject has seen a change in motor symptoms such as tremors and movements prior to administration of the composition described herein. Non-limiting examples of tremors include, unilateral or bilateral mild tremors, bilateral or midline moderate tremors or intractable tremors. Non-limiting examples of movements include mild bradykinesia, moderate bradykinesia, severe bradykinesia and morning akinesia.

[0731] In certain embodiments, a subject may have changes in balance such as, but not limited to, impaired balance, impaired righting reflexes, significant balance disorder or falling.

[0732] In certain embodiments, a subject may have a reduced quality of life. In certain embodiments, the subject may have a moderate impact on their quality of life such as experiencing some limitations to activities of daily living. In certain embodiments, the subject may have a quality of life which has been diminished by illness.

[0733] In certain embodiments, a subject has seen a change in non-motor symptoms prior to administration of the composition described herein. In certain embodiments, the subject may have mild to moderate cognitive impairment prior to administration to the composition described herein. In certain embodiments, the subject may have significant cognitive impairment such as dementia which may also include behavioral disturbances such as hallucinations.

[0734] In certain embodiments, a subject may have a satisfactory response with limited fluctuations on one or more dopaminergic medications prior to administration of the compositions described herein.

[0735] In certain embodiments, a subject may have motor fluctuations causing mild to moderate disability on one or more dopaminergic medications prior to administration of the compositions described herein.

[0736] In certain embodiments, a subject may have medically refractory motor fluctuations consisting of “wearing off” and/or levodopa-induced dyskinesias causing significant disability prior to administration of the compositions described herein.

[0737] In certain embodiments, a subject may have mild symptoms associated with Parkinson's disease such as, but not limited to, no cognitive impairment, diagnosed within the past 5 years, satisfactory response with limited fluctuations on one or more dopaminergic medications, unilateral or bilateral mild tremors, little to no impact on the quality of life, and/or no balance impairment.

[0738] In certain embodiments, a subject may have moderate symptoms associated with Parkinson's disease such as, but not limited to, mild to moderate cognitive impairment, first signs of impaired balance and righting reflexes, motor fluctuations causing mild-moderate disability on one or more dopaminergic medications, diagnosed within the past 5 to 10 years, bilateral or midline moderate tremors, moderate bradykinesia and/or subject experiencing some limitations to activities of daily living.

[0739] In certain embodiments, a subject may have advanced symptoms associated with Parkinson's disease such as, but not limited to, being diagnosed with Parkinson's more than 10 years, medium refractory motor fluctuations wearing off and/or levodopa-induced dyskinesia causing significant disability, intractable tremors, significant balance disorder and/or falling, significant cognitive impairment (such as dementia with or without behavioral disturbances), sever bradykinesia, quality of life markedly diminished by illness and/or morning akinesia.

[0740] In certain embodiments, a subject has been referred to a movement disorder specialist (MDS) but has not undergone deep brain stimulation.

[0741] In certain embodiments, a subject is using DUOPA™ in combination with the compositions described herein. In certain embodiments, the subject may have success with using DUOPA™ alone. In certain embodiments, the subject may not have any success or limited success using DUOPA™ alone.

[0742] In certain embodiments, a subject is one who was a candidate for surgical intervention including, but not limited to, deep-brain stimulation. In certain embodiments, deep-brain stimulation was suggested due to disabling motor complications despite treatment with optimal anti-Parkinsonian medication.

### Kits and Devices

[0743] In some embodiments, the disclosure provides a variety of kits for conveniently and/or effectively carrying out methods of the present disclosure. Typically, kits will comprise sufficient amounts and/or numbers of components to allow a user to perform multiple treatments of a subject(s) and/or to perform multiple experiments.

[0744] Any of the AAV particles of the present disclosure may be comprised in a kit. In some embodiments, kits may further comprise reagents and/or instructions for creating and/or synthesizing compounds and/or compositions of the present disclosure. In some embodiments, kits may also comprise one or more buffers. In some embodiments, kits of the disclosure may comprise components for making protein or nucleic acid arrays or libraries and thus, may comprise, for example, solid supports.

[0745] In some embodiments, kit components may be packaged either in aqueous media or in lyophilized form. The container means of the kits will generally comprise at least one vial, test tube, flask, bottle, syringe or other container means, into which a component may be placed, and preferably, suitably aliquoted. Where there is more than one kit component, (labeling reagent and label may be packaged together), kits may also generally contain second, third or other additional containers into which additional components may be separately placed. In some embodiments, kits may also comprise second container means for containing sterile, pharmaceutically acceptable buffers and/or other diluents. In some embodiments, various combinations of components may be comprised in one or more vial. Kits of the present disclosure may also typically comprise means for containing compounds and/or compositions of the present disclosure, e.g., proteins, nucleic acids, and any other reagent containers in close confinement for commercial sale. Such containers may comprise injection or blow-molded plastic containers into which desired vials are retained.

[0746] In some embodiments, the vial is capable of holding at least 0.5 mL of drug substance. In some embodiments, the vial is capable of holding at least 0.8 mL of drug substance. In some embodiments, the vial is capable of holding at least 1.2 mL of drug substance. In some embodiments, the vial is capable of holding at least 1.8 mL of drug substance. In some embodiments, the vial is a 2 mL vial or a 3 mL vial, e.g., a 2 mL or 3 mL Ompi glass vial. In some embodiments, the vial further comprises a seal and stopper. For example, the seal may be a 13 mm West Pharma Flip Off Long Matte Seal and the stopper may be a 13 mm West S2-F451 4432/50. In some embodiments, the extractable volume of drug substance from the vial is about 1.0 mL. In some embodiments, the extractable volume of drug substance from the vial is about 1.6 mL. In some embodiments, the vial is stored (e.g., prior to treatment) at ≤65° C.

[0747] In some embodiments, kit components are provided in one and/or more liquid solutions. In some embodiments, liquid solutions are aqueous solutions, with sterile aqueous solutions being particularly preferred. In some embodiments, kit components may be provided as dried powder(s). When reagents and/or components are provided as dry powders, such powders may be reconstituted by the addition of suitable volumes of solvent. In some embodiments, it is envisioned that solvents may also be provided in another container means. In some embodiments, labeling dyes are provided as dried powders. In some embodiments, it is contemplated that 10, 20, 30, 40, 50, 60, 70, 80, 90, 100, 120, 120, 130, 140, 150, 160, 170, 180, 190, 200, 300, 400, 500, 600, 700, 800, 900, 1000 micrograms or at least or at most those amounts of dried dye are provided in kits of the disclosure. In such embodiments, dye may then be resuspended in any suitable solvent, such as DMSO.

[0748] In some embodiments, kits may comprise instructions for employing kit components as well the use of any other reagent not comprised in the kit. Instructions may comprise variations that may be implemented.

### VI. Definitions

[0749] At various places in the present disclosure, substituents or properties of compounds of the present disclosure are disclosed in groups or in ranges. It is specifically intended that the present disclosure comprise each and every individual or sub-combination of the members of such groups and ranges. All ranges include the endpoints unless stated otherwise.

[0750] Unless stated otherwise, the following terms and phrases have the meanings described below. The definitions are not meant to be limiting in nature and serve to provide a clearer understanding of certain aspects of the present disclosure.

[0751] AAV Particle: As used herein, an “AAV particle” is a virus which comprises a capsid and a viral genome with at least one payload region and at least one ITR region. AAV particles of the present disclosure may be produced recombinantly and may be based on adeno-associated virus (AAV) parent or reference sequences. AAV particle may be derived from any serotype, described herein or known in the art, comprising combinations of serotypes (i.e., “pseudotyped” AAV) or from various genomes (e.g., single stranded or self-complementary). In addition, the AAV particle may be replication defective and/or targeted.

[0752] Administered in combination: As used herein, the term “administered in combination” or “combined administration” means that two or more agents are administered to a subject at the same time or within an interval such that there may be an overlap of an effect of each agent on the patient. In certain embodiments, they are administered within about 60, 30, 15, 10, 5, or 1 minute of one another. In certain embodiments, the administrations of the agents are spaced sufficiently closely together such that a combinatorial (e.g., a synergistic) effect is achieved.

[0753] Amelioration: As used herein, the term “amelioration” or “ameliorating” refers to a lessening of severity of at least one indicator of a condition or disease. For example, in the context of neurodegeneration disorder, amelioration comprises the reduction of neuron loss. Amelioration includes but does not require complete amelioration.

[0754] Animal: As used herein, the term “animal” refers to any member of the animal kingdom. In certain embodiments, “animal” refers to humans at any stage of development. In certain embodiments, “animal” refers to non-human animals at any stage of development. In certain embodiments, the non-human animal is a mammal (e.g., a rodent, a mouse, a rat, a rabbit, a monkey, a dog, a cat, a sheep, cattle, a primate, or a pig). In certain embodiments, animals comprise, but are not limited to, mammals, birds, reptiles, amphibians, fish, and worms. In certain embodiments, the animal is a transgenic animal, genetically-engineered animal, or a clone.

[0755] Approximately or about: As used herein, the term “approximately” or “about,” as applied to one or more values of interest, refers to a value that is similar to a stated reference value. As used herein, the term “about” means+/−10% of the recited value.

[0756] Associated with: As used herein, the terms “associated with,” “conjugated,” “linked,” “attached,” and “tethered,” when used with respect to two or more moieties, means that the moieties are physically associated or connected with one another, either directly or via one or more additional moieties that serves as a linking agent, to form a structure that is sufficiently stable so that the moieties remain physically associated under the conditions in which the structure is used, e.g., physiological conditions. An “association” need not be strictly through direct covalent chemical bonding. It may also suggest ionic or hydrogen bonding or a hybridization-based connectivity sufficiently stable such that the “associated” entities remain physically associated.

[0757] Baculoviral expression vector (BEV): As used herein a BEV is a baculoviral expression vector, i.e., a polynucleotide vector of baculoviral origin. Systems using BEVs are known as baculoviral expression vector systems (BEVSs).

[0758] Biologically active: As used herein, the phrase “biologically active” refers to a characteristic of any substance that has activity in a biological system and/or organism. For instance, a substance that, when administered to an organism, has a biological effect on that organism, is considered to be biologically active. In particular embodiments, an AAV particle of the present disclosure may be considered biologically active if even a portion of the encoded payload is biologically active or mimics an activity considered biologically relevant.

[0759] Capsid: As used herein, the term “capsid” refers to the exterior of a virus particle, e.g., a shell of a virus particle comprising protein (e.g., >80%, >90%, >95%, >99%, or 100% protein). In some embodiments, the capsid is an AAV capsid comprising at least one AAV capsid protein described herein, e.g., a VP1, VP2, and/or VP3 polypeptide.

[0760] Codon optimized: As used herein, the terms “codon optimized” or “codon optimization” refers to a modified nucleic acid sequence which encodes the same amino acid sequence as a parent/reference sequence, but which has been altered such that the codons of the modified nucleic acid sequence are optimized or improved for expression in a particular system (such as a particular species or group of species). As a non-limiting example, a nucleic acid sequence which comprises an AAV capsid protein can be codon optimized for expression in insect cells or in a particular insect cell such Spodopterafrugiperda cells. Codon optimization can be completed using methods and databases known to those in the art.

[0761] Complementary and substantially complementary: As used herein, the term “complementary” refers to the ability of polynucleotides to form base pairs with one another. Base pairs are typically formed by hydrogen bonds between nucleotide units in antiparallel polynucleotide strands. Complementary polynucleotide strands can form base pair in the Watson-Crick manner (e.g., A to T, A to U, C to G), or in any other manner that allows for the formation of duplexes. As persons skilled in the art are aware, when using RNA as opposed to DNA, uracil rather than thymine is the base that is considered to be complementary to adenosine. However, when a U is denoted in the context of the present disclosure, the ability to substitute a T is implied, unless otherwise stated. Perfect complementarity or 100% complementarity refers to the situation in which each nucleotide unit of one polynucleotide strand can form hydrogen bond with a nucleotide unit of a second polynucleotide strand. Less than perfect complementarity refers to the situation in which some, but not all, nucleotide units of two strands can form hydrogen bond with each other. For example, for two 20-mers, if only two base pairs on each strand can form hydrogen bond with each other, the polynucleotide strands exhibit 10% complementarity. In the same example, if 18 base pairs on each strand can form hydrogen bonds with each other, the polynucleotide strands exhibit 90% complementarity.

[0762] Compound: Compounds of the present disclosure comprise all of the isotopes of the atoms occurring in the intermediate or final compounds. “Isotopes” refers to atoms having the same atomic number but different mass numbers resulting from a different number of neutrons in the nuclei. For example, isotopes of hydrogen comprise tritium and deuterium.

[0763] The compounds and salts of the present disclosure can be prepared, in various embodiments, in combination with solvent or water molecules to form solvates and hydrates by routine methods.

[0764] Control Elements: As used herein, “control elements”, “regulatory control elements” or “regulatory sequences” refers to promoter regions, polyadenylation signals, transcription termination sequences, upstream regulatory domains, origins of replication, internal ribosome entry sites (“IRES”), enhancers, and the like, which provide for the replication, transcription and translation of a coding sequence in a recipient cell. Not all of these control elements need always be present as long as the selected coding sequence is capable of being replicated, transcribed and/or translated in an appropriate host cell.

[0765] Delivery: As used herein, “delivery” refers to the act or manner of delivering an AAV particle, a compound, substance, entity, moiety, cargo or payload.

[0766] Delivery Agent: As used herein, “delivery agent” refers to any substance which facilitates, at least in part, the in vivo delivery of an AAV particle to targeted cells.

[0767] Destabilized: As used herein, the term “destabilize,” or “destabilizing region” means a region or molecule that is less stable than a starting, wild-type or native form of the same region or molecule.

[0768] Detectable label: As used herein, “detectable label” refers to one or more markers, signals, or moieties which are attached, incorporated or associated with another entity that is readily detected by methods known in the art comprising radiography, fluorescence, chemiluminescence, enzymatic activity, absorbance and the like. Detectable labels comprise radioisotopes, fluorophores, chromophores, enzymes, dyes, metal ions, ligands such as biotin, avidin, streptavidin and haptens, quantum dots, and the like. Detectable labels may be located at any position in the peptides or proteins disclosed herein. They may be within the amino acids, the peptides, or proteins, or located at the N- or C-termini.

[0769] Distal: As used herein, the term “distal” means situated away from the center or away from a point or region of interest.

[0770] Dosing regimen: As used herein, a “dosing regimen” is a schedule of administration or physician determined regimen of treatment, prophylaxis, or palliative care.

[0771] Engineered: As used herein, embodiments of the present disclosure are “engineered” when they are designed to have a feature or property, whether structural or chemical, that varies from a starting point, wild type or native molecule.

[0772] Effective Amount: As used herein, the term “effective amount” of an agent is that amount sufficient to effect beneficial or desired results, for example, clinical results, and, as such, an “effective amount” depends upon the context in which it is being applied. For example, in the context of administering an agent that treats cancer, an effective amount of an agent is, for example, an amount sufficient to achieve treatment, as defined herein, of cancer, as compared to the response obtained without administration of the agent.

[0773] Expression: As used herein, “expression” of a nucleic acid sequence refers to one or more of the following events: (1) production of an RNA template from a DNA sequence (e.g., by transcription); (2) processing of an RNA transcript (e.g., by splicing, editing, 5′ cap formation, and/or 3′ end processing); (3) translation of an RNA into a polypeptide or protein; and (4) post-translational modification of a polypeptide or protein.

[0774] Fragment: A “fragment,” as used herein, refers to a portion. For example, fragments of proteins may comprise polypeptides obtained by digesting full-length protein isolated from cultured cells.

[0775] Functional: As used herein, a “functional” biological molecule is a biological molecule in a form in which it exhibits a property and/or activity by which it is characterized.

[0776] Gene expression: The term “gene expression” refers to the process by which a nucleic acid sequence undergoes successful transcription and in most instances translation to produce a protein or peptide. For clarity, when reference is made to measurement of “gene expression”, this should be understood to mean that measurements may be of the nucleic acid product of transcription, e.g., RNA or mRNA or of the amino acid product of translation, e.g., polypeptides or peptides. Methods of measuring the amount or levels of RNA, mRNA, polypeptides and peptides are well known in the art.

[0777] Homology: As used herein, the term “homology” refers to the overall relatedness between polymeric molecules, e.g., between polynucleotide molecules (e.g., DNA molecules and/or RNA molecules) and/or between polypeptide molecules. In certain embodiments, polymeric molecules are considered to be “homologous” to one another if their sequences are at least 90% identical or similar, e.g., using an alignment program such as BLAST (e.g., BLASTP or BLASTN).

[0778] Identity: As used herein, the term “identity” refers to the overall relatedness between polymeric molecules, e.g., between polynucleotide molecules (e.g., DNA molecules and/or RNA molecules) and/or between polypeptide molecules. Calculation of the percent identity of two polynucleotide sequences, for example, can be performed by aligning the two sequences for optimal comparison purposes (e.g., gaps can be introduced in one or both of a first and a second nucleic acid sequences for optimal alignment and non-identical sequences can be disregarded for comparison purposes). In certain embodiments, the length of a sequence aligned for comparison purposes is at least 30%, at least 40%, at least 50%, at least 60%, at least 70%, at least 80%, at least 90%, at least 95%, or 100% of the length of the reference sequence. The nucleotides at corresponding nucleotide positions are then compared. When a position in the first sequence is occupied by the same nucleotide as the corresponding position in the second sequence, then the molecules are identical at that position. The percent identity between the two sequences is a function of the number of identical positions shared by the sequences, taking into account the number of gaps, and the length of each gap, which needs to be introduced for optimal alignment of the two sequences. The comparison of sequences and determination of percent identity between two sequences can be accomplished using a mathematical algorithm. For example, the percent identity between two nucleotide sequences can be determined using methods such as those described in Computational Molecular Biology, Lesk, A. M., ed., Oxford University Press, New York, 1988; Biocomputing: Informatics and Genome Projects, Smith, D. W., ed., Academic Press, New York, 1993; Sequence Analysis in Molecular Biology, von Heinje, G., Academic Press, 1987; Computer Analysis of Sequence Data, Part I, Griffin, A. M., and Griffin, H. G., eds., Humana Press, New Jersey, 1994; and Sequence Analysis Primer, Gribskov, M. and Devereux, J., eds., M Stockton Press, New York, 1991; the contents of which are each incorporated herein by reference in their entireties, insofar as they do not conflict with the present disclosure. For example, the percent identity between two nucleotide sequences can be determined using the algorithm of Meyers and Miller (CABIOS, 1989, 4:11-17), which has been incorporated into the ALIGN program (version 2.0) using a PAM120 weight residue table, a gap length penalty of 12 and a gap penalty of 4. The percent identity between two nucleotide sequences can, alternatively, be determined using the GAP program in the GCG software package using an NWSgapdna.CMP matrix. Methods commonly employed to determine percent identity between sequences comprise, but are not limited to those disclosed in Carillo, H., and Lipman, D., SIAM J Applied Math., 48:1073 (1988); the contents of which are each incorporated herein by reference in their entireties, insofar as they does not conflict with the present disclosure. Techniques for determining identity are codified in publicly available computer programs. Exemplary computer software to determine homology between two sequences (e.g., for local alignment and/or for global alignment) comprise, but are not limited to, GCG program package, Devereux, J., et al., Nucleic Acids Research, 12(1), 387 (1984)); BLASTP, BLASTN, and FASTA Altschul, S. F. et al., J. Molec. Biol., 215, 403 (1990)); EMBOSS Needle; and/or Needleman-Wunsch algorithm (e.g., NWSgapdna.CMP).

[0779] Isolated: As used herein, the term “isolated” refers to a substance or entity that has been separated from at least some of the components with which it was associated (whether in nature or in an experimental setting). Isolated substances may have varying levels of purity in reference to the substances from which they have been associated.

[0780] Linker: As used herein “linker” refers to a molecule or group of molecules which connects two molecules. A linker may be a nucleic acid sequence connecting two nucleic acid sequences encoding two different polypeptides. The linker may or may not be translated. The linker may be a cleavable linker.

[0781] MicroRNA (miRNA) binding site: As used herein, a microRNA (miRNA) binding site represents a nucleotide location or region of a nucleic acid transcript to which at least the “seed” region of a miRNA binds.

[0782] Modified: As used herein “modified” refers to a changed state or structure of a molecule of the present disclosure. Molecules may be modified in many ways comprising chemically, structurally, and functionally. As used herein, embodiments of the disclosure are “modified” when they have or possess a feature or property, whether structural or chemical, that varies from a starting point, wild type or native molecule. Mutation: As used herein, the term “mutation” refers to any changing of the structure of a gene, resulting in a variant (also called “mutant”) form that may be transmitted to subsequent generations. Mutations in a gene may be caused by the alternation of single base in DNA, or the deletion, insertion, or rearrangement of larger sections of genes or chromosomes. In certain embodiments, a variant can be a mutant sequence. In certain embodiments, a variant may comprise at least about 90% identity to a native sequence. As used herein, a native or starting sequence refers to an original molecule against which a comparison may be made, such as a wild-type or naturally-occurring sequence known to one of skill in the art. “Native” or “starting” sequences or molecules may represent the wild-type (the sequence found in nature) but do not have to be the wild-type sequence.

[0783] Naturally Occurring: As used herein, “naturally occurring” or “wild-type” means existing in nature without artificial aid, or involvement of the hand of man.

[0784] Open reading frame: As used herein, “open reading frame” or “ORF” refers to a sequence which does not contain a stop codon within the given reading frame, other than at the end of the reading frame.

[0785] Operably linked: As used herein, the phrase “operably linked” refers to a functional connection between two or more molecules, constructs, transcripts, entities, moieties or the like. As a non-limiting example, a promoter is “operably linked” to a nucleotide sequence when the promoter sequence controls and/or regulates the transcription of the nucleotide sequence.

[0786] Payload: As used herein, “payload” or “payload region” refers to one or more polynucleotides or polynucleotide regions encoded by or within a viral genome or an expression product of such polynucleotide or polynucleotide region, e.g., a transgene, a polynucleotide encoding a polypeptide or multi-polypeptide, or a modulatory nucleic acid or regulatory nucleic acid.

[0787] Payload construct: As used herein, a “payload construct” is one or more vector construct which comprises a polynucleotide region encoding or comprising a payload (e.g., a nucleic acid encoding an AADC protein or a functional variant) that is flanked on one or both sides by an inverted terminal repeat (ITR) sequence. Additional nucleic acid components may be present between the ITRs and the payload sequence. The payload construct may present a template that is replicated in a viral production cell to produce a therapeutic viral genome.

[0788] Payload construct vector: As used herein, “payload construct vector” is a vector encoding or comprising a payload construct, and regulatory regions for replication and expression of the payload construct in bacterial cells.

[0789] Payload construct expression vector: As used herein, a “payload construct expression vector” is a vector encoding or comprising a payload construct and which further comprises one or more polynucleotide regions encoding or comprising components for viral expression in a viral replication cell.

[0790] Pharmaceutically acceptable: The phrase “pharmaceutically acceptable” is employed herein to refer to those compounds, materials, compositions, and/or dosage forms which are, within the scope of sound medical judgment, suitable for use in contact with the tissues of human beings and animals without excessive toxicity, irritation, allergic response, or other problem or complication, commensurate with a reasonable benefit/risk ratio.

[0791] Pharmaceutically acceptable excipients: The phrase “pharmaceutically acceptable excipient,” as used herein, refers any ingredient other than the compounds described herein (for example, a vehicle capable of suspending or dissolving the active compound) and having the properties of being substantially nontoxic and non-inflammatory in a patient.

[0792] Pharmaceutically acceptable salts: The present disclosure also comprises pharmaceutically acceptable salts of the compounds described herein. As used herein, “pharmaceutically acceptable salts” refers to derivatives of the disclosed compounds wherein the parent compound is modified by converting an existing acid or base moiety to its salt form (e.g., by reacting the free base group with a suitable organic acid). Examples of pharmaceutically acceptable salts comprise, but are not limited to, mineral or organic acid salts of basic residues such as amines; alkali or organic salts of acidic residues such as carboxylic acids; and the like. In certain embodiments, the pharmaceutically acceptable salts of the present disclosure comprise the conventional non-toxic salts of the parent compound formed, for example, from non-toxic inorganic or organic acids. In certain embodiments, the pharmaceutically acceptable salts of the present disclosure can be synthesized from the parent compound which contains a basic or acidic moiety by conventional chemical methods. Lists of suitable salts are found in Remington's Pharmaceutical Sciences, 17^{th} ed., Mack Publishing Company, Easton, Pa., 1985, p. 1418, Pharmaceutical Salts: Properties, Selection, and Use, P.H. Stahl and C.G. Wermuth (eds.), Wiley-VCH, 2008, and Berge et al., Journal of Pharmaceutical Science, 66, 1-19 (1977), the contents of which are each incorporated herein by reference in their entireties, insofar as they do not conflict with the present disclosure.

[0793] Pharmaceutically acceptable solvate: The term “pharmaceutically acceptable solvate,” as used herein, means a compound of the present disclosure wherein molecules of a suitable solvent are incorporated in the crystal lattice. In certain embodiments, a suitable solvent is physiologically tolerable at the dosage administered.

[0794] Pharmacokinetic: As used herein, “pharmacokinetic” refers to any one or more properties of a molecule or compound as it relates to the determination of the fate of substances administered to a living organism. Pharmacokinetics is divided into several areas comprising the extent and rate of absorption, distribution, metabolism and excretion. This is commonly referred to as ADME where: (A) Absorption is the process of a substance entering the blood circulation; (D) Distribution is the dispersion or dissemination of substances throughout the fluids and tissues of the body; (M) Metabolism (or Biotransformation) is the irreversible transformation of parent compounds into daughter metabolites; and (E) Excretion (or Elimination) refers to the elimination of the substances from the body. In rare cases, some drugs irreversibly accumulate in body tissue.

[0795] Physicochemical: As used herein, “physicochemical” means of or relating to a physical and/or chemical property.

[0796] Preventing: As used herein, the term “preventing” or “prevention” refers to partially or completely delaying onset of an infection, disease, disorder and/or condition; partially or completely delaying onset of one or more symptoms, features, or clinical manifestations of a particular infection, disease, disorder, and/or condition; partially or completely delaying onset of one or more symptoms, features, or manifestations of a particular infection, disease, disorder, and/or condition; partially or completely delaying progression from an infection, a particular disease, disorder and/or condition; and/or decreasing the risk of developing pathology associated with the infection, the disease, disorder, and/or condition.

[0797] Protein of interest: As used herein, the terms “proteins of interest” or “desired proteins” comprise those provided herein and fragments, mutants, variants, and alterations thereof. In some embodiments, the protein of interest is AADC or a functional variant thereof.

[0798] Proximal: As used herein, the term “proximal” means situated nearer to the center or to a point or region of interest.

[0799] RNA or RNA molecule: As used herein, the term “RNA” or “RNA molecule” or “ribonucleic acid molecule” refers to a polymer of ribonucleotides; the term “DNA” or “DNA molecule” or “deoxyribonucleic acid molecule” refers to a polymer of deoxyribonucleotides. DNA and RNA can be synthesized naturally, e.g., by DNA replication and transcription of DNA, respectively; or be chemically synthesized. DNA and RNA can be single-stranded (i.e., ssRNA or ssDNA, respectively) or multi-stranded (e.g., double stranded, i.e., dsRNA and dsDNA, respectively). The term “mRNA” or “messenger RNA”, as used herein, refers to a single stranded RNA that encodes the amino acid sequence of one or more polypeptide chains.

[0800] Sample: As used herein, the term “sample” or “biological sample” refers to a subset of its tissues, cells or component parts (e.g., body fluids, comprising but not limited to blood, mucus, lymphatic fluid, synovial fluid, cerebrospinal fluid, saliva, amniotic fluid, amniotic cord blood, urine, vaginal fluid and semen). A sample further may comprise a homogenate, lysate or extract prepared from a whole organism or a subset of its tissues, cells or component parts, or a fraction or portion thereof, comprising but not limited to, for example, plasma, serum, spinal fluid, lymph fluid, the external sections of the skin, respiratory, intestinal, and genitourinary tracts, tears, saliva, milk, blood cells, tumors, organs. A sample further refers to a medium, such as a nutrient broth or gel, which may contain cellular components, such as proteins or nucleic acid molecule.

[0801] Self-complementary viral particle: As used herein, a “self-complementary viral particle” is a particle comprised of at least two components, a protein capsid and a polynucleotide sequence encoding a self-complementary genome enclosed within the capsid.

[0802] Signal Sequences: As used herein, the phrase “signal sequences” refers to a sequence which can direct the transport or localization of a protein.

[0803] Single unit dose: As used herein, a “single unit dose” is a dose of any therapeutic administered in one dose/at one time/single route/single point of contact, i.e., single administration event. In certain embodiments, a single unit dose is provided as a discrete dosage form (e.g., a tablet, capsule, patch, loaded syringe, vial, etc.).

[0804] Stable: As used herein “stable” refers to a compound that is sufficiently robust to survive isolation to a useful degree of purity from a reaction mixture for a set period of time, and in certain embodiments, capable of formulation into an efficacious therapeutic agent.

[0805] Stabilized: As used herein, the term “stabilize”, “stabilized,” “stabilized region” means to make or become stable.

[0806] Subject: As used herein, the term “subject” or “patient” refers to any organism to which a composition in accordance with the present disclosure may be administered, e.g., for experimental, diagnostic, prophylactic, and/or therapeutic purposes. Typical subjects comprise animals (e.g., mammals such as mice, rats, rabbits, non-human primates, and humans) and/or plants. The subject or patient may seek or need treatment, require treatment, is receiving treatment, will receive treatment, or is under care by a trained professional for a particular disease or condition.

[0807] Sufferingfrom: An individual who is “suffering from” a disease, disorder, and/or condition has been diagnosed with or displays one or more symptoms of a disease, disorder, and/or condition.

[0808] Susceptible to: An individual who is “susceptible to” a disease, disorder, and/or condition has not been diagnosed with and/or may not exhibit symptoms of the disease, disorder, and/or condition but harbors a propensity to develop a disease or its symptoms. In certain embodiments, an individual who is susceptible to a disease, disorder, and/or condition (for example, cancer) may be characterized by one or more of the following: (1) a genetic mutation associated with development of the disease, disorder, and/or condition; (2) a genetic polymorphism associated with development of the disease, disorder, and/or condition; (3) increased and/or decreased expression and/or activity of a protein and/or nucleic acid associated with the disease, disorder, and/or condition; (4) habits and/or lifestyles associated with development of the disease, disorder, and/or condition; (5) a family history of the disease, disorder, and/or condition; and (6) exposure to and/or infection with a microbe associated with development of the disease, disorder, and/or condition. In certain embodiments, an individual who is susceptible to a disease, disorder, and/or condition will develop the disease, disorder, and/or condition. In certain embodiments, an individual who is susceptible to a disease, disorder, and/or condition will not develop the disease, disorder, and/or condition.

[0809] Synthetic: The term “synthetic” means produced, prepared, and/or manufactured by the hand of man. Synthesis of polynucleotides or polypeptides or other molecules of the present disclosure may be chemical or enzymatic.

[0810] Targeted Cells: As used herein, “targeted cells” refers to any one or more cells of interest that may be treated by an AAV disclosed herein. The cells may be found in vitro, in vivo, in situ or in the tissue or organ of an organism. The organism may be an animal, such as a mammal, a human, or a human patient.

[0811] Terminal region: As used herein, the term “terminal region” refers to a region on the 5′ or 3′ end of a region of linked nucleosides or amino acids (polynucleotide or polypeptide, respectively).

[0812] Terminally optimized: The term “terminally optimized” when referring to nucleic acids means the terminal regions of the nucleic acid are improved in some way, e.g., codon optimized, over the native or wild type terminal regions.

[0813] Therapeutic Agent: The term “therapeutic agent” refers to any agent that, when administered to a subject, has a therapeutic, diagnostic, and/or prophylactic effect and/or elicits a desired biological and/or pharmacological effect.

[0814] Therapeutically effective amount: As used herein, the term “therapeutically effective amount” means an amount of an agent to be delivered (e.g., nucleic acid, drug, therapeutic agent, diagnostic agent, prophylactic agent, etc.) that is sufficient, when administered to a subject suffering from or susceptible to an infection, disease, disorder, and/or condition, to treat, improve symptoms of, diagnose, prevent, and/or delay the onset of the infection, disease, disorder, and/or condition. In certain embodiments, a therapeutically effective amount is provided in a single dose. In certain embodiments, a therapeutically effective amount is administered in a dosage regimen comprising a plurality of doses. Those skilled in the art will appreciate that in certain embodiments, a unit dosage form may be considered to comprise a therapeutically effective amount of a particular agent or entity if it comprises an amount that is effective when administered as part of such a dosage regimen.

[0815] Therapeutically effective outcome: As used herein, the term “therapeutically effective outcome” means an outcome that is sufficient in a subject suffering from or susceptible to an infection, disease, disorder, and/or condition, to treat, improve symptoms of, diagnose, prevent, and/or delay the onset of the infection, disease, disorder, and/or condition.

[0816] Transfection: As used herein, the term “transfection” refers to methods to introduce exogenous nucleic acids into a cell. Methods of transfection comprise, but are not limited to, chemical methods, physical treatments and cationic lipids or mixtures.

[0817] Treating: As used herein, the term “treating” refers to partially or completely alleviating, ameliorating, improving, relieving, delaying onset of, inhibiting progression of, reducing severity of, and/or reducing incidence of one or more symptoms or features of a particular infection, disease, disorder, and/or condition. Treatment may be administered to a subject who does not exhibit signs of a disease, disorder, and/or condition and/or to a subject who exhibits only early signs of a disease, disorder, and/or condition for the purpose of decreasing the risk of developing pathology associated with the disease, disorder, and/or condition.

[0818] Vector: As used herein, a “vector” is any molecule or moiety which transports, transduces or otherwise acts as a carrier of a heterologous molecule. Vectors of the present disclosure may be produced recombinantly and may be based on and/or may comprise adeno-associated virus (AAV) sequence(s), e.g., those comprising or derived from wildtype, naturally-occurring, or engineered AAV sequences known in the art. In some embodiments, a vector may comprise sequences to which a payload is included (e.g., a shuttle plasmid sequence which includes a heterologous payload sequence). In some embodiments, a vector comprising a payload sequence can be considered a vector genome when encapsulated in a particle, e.g., an AAV viral genome in an AAV particle

[0819] Viral genome: As used herein, a “viral genome” or “vector genome” refers to the nucleic acid sequence(s) encapsulated in an AAV particle.

### VII. Equivalents and Scope

[0820] Those skilled in the art will recognize or be able to ascertain using no more than routine experimentation, many equivalents to the specific embodiments in accordance with the present disclosure described herein. The scope of the present disclosure is not intended to be limited to the above Description, but rather is as set forth in the appended claims.

[0821] In the claims, articles such as “a,” “an,” and “the” may mean one or more than one unless indicated to the contrary or otherwise evident from the context. Claims or descriptions that comprise “or” between one or more members of a group are considered satisfied if one, more than one, or all of the group members are present in, employed in, or otherwise relevant to a given product or process unless indicated to the contrary or otherwise evident from the context. The present disclosure comprises embodiments in which exactly one member of the group is present in, employed in, or otherwise relevant to a given product or process. The present disclosure comprises embodiments in which more than one, or the entire group members are present in, employed in, or otherwise relevant to a given product or process.

[0822] It is also noted that the term “comprising” is intended to be open and permits but does not require the inclusion of additional elements or steps. When the term “comprising” is used herein, the term “consisting of” is thus also encompassed and disclosed.

[0823] Where ranges are given, endpoints are comprised. Furthermore, it is to be understood that unless otherwise indicated or otherwise evident from the context and understanding of one of ordinary skill in the art, values that are expressed as ranges can assume any specific value or subrange within the stated ranges in different embodiments of the present disclosure, to the tenth of the unit of the lower limit of the range, unless the context clearly dictates otherwise.

[0824] All terms used herein should be given their ordinary meaning by those of skill in the art unless the disclosure indicates otherwise.

[0825] In addition, it is to be understood that any particular embodiment of the present disclosure that falls within the prior art may be explicitly excluded from any one or more of the claims. Since such embodiments are deemed to be known to one of ordinary skill in the art, they may be excluded even if the exclusion is not set forth explicitly herein. Any particular embodiment of the compositions of the present disclosure (e.g., any antibiotic, therapeutic or active ingredient; any method of production; any method of use; etc.) can be excluded from any one or more claims, for any reason, whether or not related to the existence of prior art.

[0826] It is to be understood that the words which have been used are words of description rather than limitation, and that changes may be made within the purview of the appended claims without departing from the true scope and spirit of the present disclosure in its broader aspects.

[0827] While the present disclosure has been described at some length and with some particularity with respect to the several described embodiments, it is not intended that it should be limited to any such particulars or embodiments or any particular embodiment, but it is to be construed with references to the appended claims so as to provide the broadest possible interpretation of such claims in view of the prior art and, therefore, to effectively encompass the intended scope of the present disclosure.

[0828] All publications, patent applications, patents, and other references mentioned herein are incorporated by reference in their entirety. In case of conflict, the present specification, comprising definitions, will control. In addition, section headings, the materials, methods, and examples are illustrative only and not intended to be limiting.

### VIII. EXAMPLES

### Example 1. Production of Source Rep/Cap BIICs (A)

### CP BEV Pool

[0829] One vial of the Sf9 CB was thawed in a 125 mL shaker flask (37° C. using waterbath, 1-5 minutes until ice crystals dissipate), and then diluted into 19-20 mL working volume of Hyclone SFX Insect Cell Culture Media. The shaker flask was incubated at 27° C. (135 rpm shaking, 0% v/v of CO₂) in a first expansion (P0, 3-4 days) until the cell density of the Sf9 cell mixture was expanded to 4.0×10⁶ cells/mL.

[0830] The cell mixture was then seeded and expanded through multiple additional expansion steps using larger shaker flasks, with a target output density of 4.0×10⁶ cells/mL for each expansion step to allow for a consistent seeding density of 0.5-1.5×10⁶ cells/mL in subsequent expansion steps. Expansions were completed at 27° C. for 3-5 days (0% v/v of CO₂) with 135 rpm shaking (≤2 L working volume) or 90 rpm shaking (>2 L working volume). The following additional expansions were completed: (i) expansion up to 200 mL working volume in a 1.0 L flask; and (ii) expansion up to 1000 mL working volume in a 3 L flask.

[0831] A Rep/Cap Transfection Mixture was prepared by combining 5 μg of Rep/Cap Bacmid material with 375 μL of WFI water. The diluted Bacmid mixture was combined with 30 μL of Promega FuGENE HD (Transfection Agent) and an additional 345 μL of WFI water, and then incubated at 27° C. for 15 minutes to provide a Transfection Cocktail.

[0832] 25 mL of expanded Sf9 cell mixture was seeded into a 125 mL flask (1.0×10⁶ cells/mL seeding concentration) and expanded to a target infection density of 2.5-4.0×10⁶ cells/mL. The Transfection Cocktail was added to the 125 mL flask and incubated at 27° C. for 5-7 days (0% v/v of CO₂, 135 rpm agitation). The resulting mixture was centrifuged in 50 mL conical tubes for 5 minutes, and the supernatant containing P1 BEVs was collected and pooled with other P1 BEV supernatants. The P1 BEV pool was stored at 5° C.

[0833] Expanded Sf9 cell mixture was seeded into a Cellstar 6-well Cell Polystyrene Culture Plate (2 mL per well, 0.5-1.0×10⁶ cells/mL seeding concentration) with gentle rocking to evenly distribute cells, followed by incubation at 27° C. for 90 minutes (0% v/v of CO₂, 0 rpm agitation). P1 BEVs were serial diluted with Hyclone SFX Insect Cell Culture Media to a target dilution of 1.0×10⁷ BEVs/mL, and then 1 mL of diluted P1 BEV mixture was added to each well with gentle rocking to evenly distribute P1 BEVs. The infection mixture was incubated at 27° C. for 90 minutes (0% v/v of CO₂, 0 rpm agitation).

[0834] Agarose gel was prepared by combining 4% w/v agarose 1:3 with Life Technologies Sf-900 Medium overlay (melt agarose at 70° C., cool to 37° C. for combination). 2 mL of Agarose Overlay was then added to each well, and the plates were maintained at room temperature for 15-20 minutes for the agarose gel to harden. Overlaid plates were then incubated at 27° C. for 5-14 days (0% v/v of CO₂, 0 rpm agitation) until plaque formation was observed. Plaques in each well were processed through testing and Plaque Picking to provide a single Plaque for Clonal Plaque Purification (i.e. Single Plaque Expansion). The Single Plaque was expanded using Sf9 cell mixture and incubated at 27° C. for 3-5 days (0% v/v of CO₂, 0 rpm agitation). The resulting CP1 BEVs were harvested using centrifugation in 50 mL conical tubes for 5 minutes and collection of supernatant containing CP1 BEVs into a CP1 BEV pool.

### BEV Infection/BIIC Production

[0835] Sf9 cell mixture was seeded and expanded through multiple expansion steps using larger shaker flasks, with a target output density of 4.0×10⁶ cells/mL for each expansion step to allow for a consistent seeding density of 0.5-1.0×10⁶ cells/mL in subsequent expansion steps. Expansions were completed at 27° C. for 3-5 days (0% v/v of CO₂) with 135 rpm shaking (≤2 L working volume) or 90 rpm shaking (>2 L working volume). The following expansions were completed: (i) expansion up to 200 mL working volume in a 1.0 L flask; (ii) expansion up to 1000 mL working volume in a 3 L flask; and (iii) expansion up to 2500 mL working volume in a 5 L flask, with a final output density of 2.0×10⁶ cells/mL.

[0836] 200 mL of expanded Sf9 cell mixture was seeded into a 1.0 L flask (1.0×10⁶ cells/mL seeding density) and expanded to a viable infection cell density of ≥2.0×10⁶ cells/mL, and then infected with 0.01 MOI of CP1 BEV. Infected cells were then incubated and expanded at 27° C. for 48-80 hours (0% v/v of CO₂, 135 rpm) until cells reach ≥2.0×10⁶ cells/mL (VCD), ≥16.5 μm cell diameter and ≥75% cell viability. The infected cells were harvested by spinning down (polypropylene centrifuge tubes, 5 min) and resuspending the cell pellet at 4.0×10⁷ cells/mL in Hyclone SFX Insect Cell Culture Media, followed by the addition of 300 mM Trehalose, 14% v/v of DMSO, and additional SFX Culture Media to provide target VCD of 2.0×10⁶ cells/mL. Rep/Cap Source BIICs were aliquoted into 2 mL or 5 mL cryovials and frozen down to ≤−65° C. using control rate freezer, and then stored at −80° C. or in LN₂ vapor.

### Example 2. Production of Source Transgene BIICs (A)

[0837] Transgene Source BIICs were produced according to Example 1, with Transgene Bacmid material used for P1 BEV production instead of Rep/Cap Bacmid material.

### Example 3. Production Source Rep/Cap BIICs (B)

### CP BEV Pool

[0838] One vial of the Sf9 CB was thawed in a 125 mL shaker flask (37° C. using waterbath, 1-5 minutes until ice crystals dissipate), and then diluted into 40 mL working volume of Hyclone SFX Insect Cell Culture Media. The shaker flask was incubated for a first expansion (P0, 3-4 days) until the cell density of the Sf9 cell mixture was expanded to 4.0×10⁶ cells/mL.

[0839] The culture was then seeded and expanded through multiple additional expansion steps using larger shaker flasks, with a target output density of 4.0×10⁶ cells/mL for each expansion step to allow for a consistent seeding density of 0.5-1.0×10⁶ cells/mL in subsequent expansion steps. Expansions were completed at 27° C. for 3-5 days and comprised: (i) expansion up to 200 mL working volume in a 1.0 L flask (P1); and (ii) expansion up to 1000 mL working volume in a 3 L flask (P2).

[0840] A Rep/Cap Transfection Mixture was prepared by combining 30 μg of Rep/Cap Bacmid material with 0.6 mL of ThermoFisher Grace's Insect Media (Transfection Media). The diluted Bacmid mixture was combined with 30 μL of ThermoFisher Cellfectin II Reagent (Transfection Agent) and an additional 0.6 mL of Transfection Media, followed by incubation at 18-25° C. for 25-35 minutes, and then further dilution with 4.8 mL of Transfection Media to provide a Transfection Cocktail.

[0841] 60 mL of expanded Sf9 cell mixture was seeded into a 125 mL flask and expanded up to 1.0×10⁶ cells/mL seeding concentration. The Sf9 cell mixture was then seeded into a 6-well Cell Culture Plate (2 mL per well, 1.0×10⁶ cells/mL seeding concentration). 1 mL of Transfection Cocktail was added to each well, and the plate was incubated at 27° C. for 4-5 hours. 2 mL of Hyclone SFX Insect Cell Culture Media was added to each well, and the plates were then incubated at 27° C. for 3-4 days. The resulting mixtures were centrifuged in 50 mL conical tubes for 5 minutes, and supernatant containing P1 BEVs was collected and pooled with other P1 BEV supernatants. The P1 BEV pool was stored at 4-8° C.

[0842] Expanded Sf9 cell mixture was seeded into a 6-well Cell Culture Plate (2 mL per well, 0.5-1.0 cells/mL seeding concentration) with gentle rocking to evenly distribute cells, followed by incubation at 27° C. for 90 minutes. P1 BEVs were serial diluted with Hyclone SFX Insect Cell Culture Media to a target dilution of 1.0-5.0×10⁷ BEVs, and then 1 mL of diluted P1 BEV mixture was added to each well with gentle rocking to evenly distribute P1 BEVs. The infection mixture was incubated at 27° C. for 90 minutes.

[0843] Agarose gel was prepared by combining 4% w/v agarose 1:3 with Life Technologies Sf-900 Medium overlay. Agarose Overlay was added to each well, and the plates were maintained at room temperature for 15-20 minutes for the agarose gel to harden. Overlaid plates were then incubated at 27° C. for 10 days until plaque formation was observed. Plaques in each well were processed through testing and Plaque Picking to provide a single Plaque for Clonal Plaque Purification (i.e. Single Plaque Expansion). The Single Plaque was expanded using Sf9 cell mixture of 120 mL pools in 500 mL flask, with incubation at 27° C. for 4 days. The resulting CP2 BEVs were harvested using centrifugation in 50 mL conical tubes for 5 minutes and collection of supernatant containing CP2 BEVs into a CP2 BEV pool.

### BEV Infection/BIIC Production

[0844] Sf9 cell mixture was seeded and expanded through multiple expansion steps up to 3000 mL working volume in a 5 L flask, with a final infection density of 1.0×10⁶ cells/mL. The expanded Sf9 cell mixture was then infected with 0.01 MOI of CP2 BEV. Infected cells were incubated and expanded at 27° C. for 48-36 hours, then harvested by spinning down (polypropylene centrifuge tubes, 5 min) and resuspending the cell pellet at 2.0×10⁷ cells/mL in Hyclone SFX Insect Cell Culture Media, followed by the addition of 300 mM Trehalose, 14% v/v of DMSO, and additional SFX Culture Media to provide target VCD of 2.0×10⁶ cells/mL. Rep/Cap Source BIICs were aliquoted into 2 mL or 5 mL cryovials and frozen down to ≤−65° C. using control rate freezer, and then stored at −80° C. or in LN₂ vapor.

### Example 4. Production of Source Transgene BIICs (B)

[0845] Transgene Source BIICs were produced according to Example 3, with Transgene Bacmid material used for P1 BEV production instead of Rep/Cap Bacmid material.

### Example 5. Exemplary Method for Producing rAAVs

### Generation of Baculovirus Expression Vectors

[0846] Baculovirus expression vectors were generated using a Bac-to-Bac™ expression system according to manufacturer's protocol (ThermoFisher/Invitrogen). Briefly, an AAV2 rep2/cap2 construct encoding AAV2 non-structural capsid proteins (Rep 52 and Rep 78) and structural capsid proteins (VP1, VP2, and VP3) was cloned into a pFastBac™ plasmid to produce a pVOY-rep2/cap2 donor plasmid (SEQ ID NO: 1781). The pVOY-rep2/cap2 plasmid was then transformed into chemically competent DH10Bac™ E. coli cells, which contains a bMON14272 baculovirus shuttle vector (bacmid) and a helper plasmid. The AAV2 rep2/cap2 construct was inserted into the bMON14272 baculovirus vector (SEQ ID NO: 1783) via transposition between the Tn7 region of the donor plasmid and the mini-attTn7 target site of the bacmid.

[0847] A baculovirus payload vector encoding an AADC payload was generated using similar steps. Briefly, a human AADC construct encoding SEQ ID NO: 979 was cloned into a pUC57 plasmid to produce a pMP-hAADC donor plasmid (SEQ ID NO: 1782). The pMP-hAADC donor plasmid was then transformed into chemically competent DH10Bac™ E. coli cells, wherein the AADC construct was inserted into the mini-attTn7 target site of bMON14272 baculovirus shuttle vector via the transposition mechanism described above.

Production of Infection BIICs from Source BIICs

[0848] Rep/Cap Source BIICs and Rep/Cap Infection BIICs referenced in this Example are also referred to as “expressionBIICs,” which comprise one or more baculoviruses (“expressionBacs”), which in turn comprise a viral expression construct encoding capsid (VP1, VP2, VP3) and replication (Rep52, Rep78) proteins for wild-type AAV2. Transgene Source BIICs and Transgene Infection BIICs referenced in this Example are also referred to as “payloadBIICs,” which comprise one or more baculoviruses (“payloadBacs”), which in turn comprise a payload construct comprising SEQ ID NO: 979.

[0849] One vial of Sf9 9f4 CB was thawed in a 125 mL shaker flask (37° C. in a waterbath, 1-5 minutes until ice crystals dissipate), and then diluted into 20 mL working volume of ESF-AF culture medium. The shaker flask was incubated at 27° C. (100 rpm shaking, 2-inch orbital diameter) in a non-humidified, ambient air, temperature regulated incubator in a first expansion until the cell density reached between 5.0-8.0×10⁶ cells/mL.

[0850] The culture was then seeded and expanded through multiple additional expansion steps using larger shaker flasks, with a target output density of 5.0-8.0×10⁶ cells/mL for each expansion step to allow for a consistent seeding density of 1.0-1.5×10⁶ cells/mL in subsequent expansion steps. Expansions were completed at 27° C. for 3-5 days with 100 rpm shaking (≤2 L working volume) or 80 rpm shaking (>2 L working volume).

[0851] The following additional expansions were completed: (i) expansion up to a 100 mL working volume in a 500 mL flask; (ii) expansion up to a 400 mL working volume in a 1.0 L flask; (iii) expansion up to a 1500 mL working volume in a 3 L flask; and (iv) expansion up to a 2500 mL working volume in each of two 5 L Production Flasks (Rep/Cap Production Flask and Transgene Production Flask).

[0852] The Rep/Cap Production Flask was incubated until cell concentration expanded to 1.8-2.5×10⁶ cells/mL and was then infected with Rep/Cap Source BIICs (Sf9:BIIC Infection Ratio of 1.0×10⁴ cell-to-cell (c/c), equivalent to 1.0×10⁵ (v/v) infection ratio). The infected cells were incubated for 72 hours (target cell diameter of ≥19.0 μm, cell culture density target of ≥3.0×10⁶ cells/mL), and then harvested by spinning down (polypropylene centrifuge tubes, 5 min at 4.0° C.) and resuspending the cell pellet at 2.0×10⁷ cells/mL in 50% 2× Freezing media (858 mL/L of ESF-AF Media, 140 mL/L of Dimethyl Sulfoxide, 113 mL/L of Trehalose, dihydrate) and 50% ESF-AF Media. The resuspended culture of Rep/Cap Infection BIICs was aliquoted into 2 mL or 5 mL cryovials and stored in LN₂ vapor.

[0853] The Transgene Production Flask was incubated until the cell concentration was expanded to 1.8-2.5×10⁶ cells/mL and was then infected with Transgene Source BIICs (Sf9:BIIC Infection Ratio of 1.0×10⁴ cell-to-cell (c/c), equivalent to 1.0×10⁵ v/v infection ratio). The infected cells were incubated for 96-100 hours (target cell diameter of ≥19.0 μm, cell culture density target of ≥3.0×10⁶ cells/mL), and then harvested by spinning down (polypropylene centrifuge tubes, 5 min at 4.0° C.) and resuspending the cell pellet at 2.0×10⁷ cells/mL in 50% 2× Freezing media (858 mL/L of ESF-AF Media, 140 mL/L of Dimethyl Sulfoxide, 113 mL/L of Trehalose, dihydrate) and 50% ESF-AF Media. The resuspended culture of Transgene Infection BIICs was aliquoted into 2 mL or 5 mL cryovials and stored in LN₂ vapor.

### Upstream—Production of Bulk Particle Pool

[0854] One vial of Sf9 9f4 CB was thawed in a 125 mL shaker flask (37° C. in a waterbath, 1-5 minutes until ice crystals dissipate), and then diluted into 20 mL working volume of ESF-AF culture medium. The shaker flask was incubated at 27° C. (130-150 rpm shaking, 25 mm orbital diameter) for about 48 hours in a non-humidified, ambient air, temperature regulated incubator in a first expansion until the cell density was expanded to between 5.0×10⁶-8.0×10⁶ cells/mL. The culture was then seeded and expanded through multiple additional expansion steps using larger shaker flasks, with a target output density of 5.0×10⁶-1.0×10⁷ cells/mL for each expansion step to allow for a consistent target seeding density of 1.0-1.5×10⁶ cells/mL in subsequent expansion steps. Expansions were completed at 27° C. for 3-5 days with 130-150 rpm shaking (≤400 mL working volume) or 100-120 rpm shaking (>400 mL working volume).

[0855] The following additional expansions were completed: (i) expansion up to 100 mL working volume in a 250 or 500 mL flask; (ii) expansion up to 400 mL working volume in a 1.0 L flask; (iii) expansion up to 1500 mL working volume in a 3 L flask; and (iv) expansion up to 2500 mL working volume in each of two 5 L flasks (5000 mL total working volume).

[0856] The expanded culture mixture was transferred to a Pall Allegro XRS 25L Bioreactor for an additional expansion (25 cpm agitation, cascading oxygen on demand up to 40% dissolved 02, 0.3 m/min fixed air sparge, 0.5 mL/min headspace flow rate 3-5 days at 27° C.) up to a 10 L working volume with a target output density of 5.0×10⁶-1.0×10⁷ cells/mL.

[0857] The Production Bioreactor was a Pall 200L Allegro Bioreactor (60 rpm agitation, cascading oxygen on demand up to 40% dissolved O₂, 1.2 L/min air overlay, 27±1° C. vessel temp, 2.5 L/min O₂ flow rate). The culture mixture was seeded into the Production Bioreactor with a target seeding density of about 1.0×10⁶ cells/mL and a 200 L working volume. The culture medium was further expanded in the Production Bioreactor up to about 3.2×10⁶ cells/mL in a 200 L working volume. The cells in the Production Bioreactor were then co-infected with expressionBIICs (1:300k expressionBIIC:Sf9 v/v) and payloadBIICs (1:100k payloadBIIC:Sf9 v/v). Infected cells were incubated for 168 hours (7 days). Post-infection, the bioreactor conditions were adjusted as follows: 70 rpm agitation, cascading oxygen on demand up to 40% dissolved O₂, 1.2 L/min air overlay, 27° C. vessel temp, 3.0 L/min O₂ flow rate. The bulk harvest was collected for lysis and processing through Downstream processing.

[0858] Samples were taken at each of the expansion and bioreaction steps to monitor cell density and viability (e.g., at least 85%, at least 90%) throughout the upstream process. Monitoring included measuring viability %, viable cell density (VCD), and average cell diameter, e.g., using ViCell.

### Downstream—Cell Lysis

[0859] Chemical Lysis was initiated on the 200 L bulk harvest in the Production Bioreactor by adding 0.2 M Arginine HCl (pH 7.5, 11.43% v/v), followed by 10% Triton X-100 surfactant (5.3% v/v, for 0.5% w/v Triton X-100 in final lysis mixture) to provide a lysis pH of 6.8-7.5. The lysis mixture was held at 27° C. for 4.0-6.0 hours at 6 W/m3 agitation, until a crude lysate pool was generated.

### Downstream—Depth Filtration

[0860] The crude lysate pool from Chemical Lysis was processed through Depth Filtration using an EMD Millipore Millistak⁺+POD filter (C0SP media series) (≤250 L/m² load challenge, inlet pressure 18 psig, differential pressure 18 psig, flow rate 1.28-2.56 L/min (e.g., 1.9 L/min)).

[0861] A filter recovery flush (10-20 L/m² load challenge, 150-200 LMH load flux) using 50 mM sodium phosphate, 350 mM sodium chloride and 0.001% w/v Pluronic F-68 (mixture pH of 7.4) was passed through the depth filter, with the flushed recovery being added to the depth filtered pool.

### Downstream—0.2 μm Filtration

[0862] A depth filtered pool from the Depth Filtration was processed through a 0.2 μm Filtration using Sartorius Sartopore 2XLG, 0.8/0.2 μm filter with a 300 L/m² load challenge (inlet pressure 18 psig, differential pressure 18 psig, flow rate 1.28-2.56 L/min (e.g., 1.9 L/min)).

[0863] A filter recovery flush (inlet pressure 18 psig, differential pressure 18 psig, flow rate 1.28-2.56 L/min (e.g., 1.9 L/min)) using 50 mM sodium phosphate, 350 mM sodium chloride and 0.001% w/v Pluronic F-68 (mixture pH of 7.4) was passed through the 0.2 μm filter, with the flushed recovery being added to the 0.2 μm filtered pool.

### Downstream—Affinity Chromatography

[0864] A clarified lysate pool from the 0.2 μm Filtration (following depth filtration) was processed through Affinity Chromatography (AFC) using a GE AVB Sepharose HP column resin (3.0-3.5 L column volume). The column resin was equilibrated (5-7 CV, 150 cm/hr) and flushed (2 CV, 150 cm/hr) with a mixture of 50 mM sodium phosphate, 350 mM sodium chloride and 0.001% w/v Pluronic F-68 (mixture pH of 7.4). The column resin was loaded with the clarified lysate pool (≤5.0×1013 VG/mL-r load challenge) at 18-25° C., then flushed with a mixture of 50 mM sodium phosphate, 350 mM sodium chloride and 0.001% w/v Pluronic F-68 (mixture pH of 7.4).

[0865] This was followed by a first wash of the column resin (5 CV, 150 cm/hr) with a mixture of 20 mM sodium citrate, 1 M sodium chloride and 0.001% w/v Pluronic F-68 (mixture pH of 6.0); and a second wash of the column resin (5 CV, 150 cm/hr) with a mixture of 10 mM sodium citrate, 350 mM sodium chloride and 0.001% w/v Pluronic F-68 (mixture pH of 6.0). The filtered product was then eluted from the column resin (2-3 CV, 150 cm/hr) using a mixture of 20 mM sodium citrate, 350 mM sodium chloride and 0.001% w/v Pluronic F-68 (mixture pH of 3.0), with a target elution pool of 2.5-3.0 CV.

[0866] The resulting elution pool was neutralized with 2 M Tris Base and 0.001% w/v Pluronic F-68 (3.0% v/v spike, target final pH of 8.0-8.5) and filtered through a Millipore SHC 0.2 μm filter (flow rate 0.35-0.583 L/min (e.g., 0.467 L/min) or 1500-2500 LMH (e.g., 2000 LMH)) (filter area 0.014 m2, filter inlet pressure 18 psi).

### Anion-Exchange Chromatography

[0867] The neutralized, filtered affinity chromatography elution pool was processed through AEX using a Millipore Fractogel TMAE HiCap(m) Pow-Through membrane resin. The AEX membrane was charged and equilibrated (5 CV, 150 cm/hr) with a first mixture of 20 mM Tris, 2 M sodium chloride and 0.001% w/v Pluronic F-68 (mixture pH of 8.0), and then a second mixture of 40 mM Tris, 170 mM sodium chloride and 0.001% w/v Pluronic F-68 (mixture pH of 8.5). The load pool (the neutralized, filtered elution pool from affinity chromatography) was load adjusted using a 100-110% v/v spike of 10 mM Tris and 0.001% w/v Pluronic F-68 (mixture pH of 8.0-8.5), with a target pool conductivity of 17 mS/cm (adjusted with 5 M NaCl) and a target pool pH of 8.5 (adjust with 2 M Tris Base). The AEX membrane system was then loaded with the adjusted neutralized, filtered affinity chromatography elution pool (1.0-5.0×10¹³ VG/mL-r load challenge) at 18-25° C. The system was flushed and eluted (2 CV, 150 cm/hr) with a mixture of 40 mM Tris, 170 mM sodium chloride and 0.001% w/v Pluronic F-68 (mixture pH of 8.5), with the entire elution being collected. The AEX elution pool was then processed through 0.2 μm Filtration using an EMD Millipore Express SHCXL150 filter (≤1000 L/m² load challenge, ≤30 psi), resulting in an AEX pool.

### Tangential Flow Filtration (TFF)

[0868] The neutralized AEX pool was processed through TFF using a Millipore Ultracel PLCTK system with Pellicon-3 cassette (0.57 m², 30 kDA MWCO, 2-3 L/m²load challenge, 6 psi TMP, 5-10 psi inlet feed). The TFF system was first rinsed (25 L/m²) with WFI water, then sanitized (25 L/m², 45 min hold) with 0.25 M NaOH, then equilibrated (25 L/m²) with an equilibration buffer (pH 8.5) comprising 40 mM Tris, 170 mM sodium chloride, and 0.001% (w/v) Pluronic F-68, with equilibration continuing until both permeate and retentate effluents were at pH 8.5. The TFF Load pool was concentrated through ultrafiltration (2.6 L/min) to a target concentration of 5.0×10¹² VG/mL (confirmed by ddPCR), and then a diafiltration step (8 DV, 2.6 L/min) using a diafiltration buffer which comprises 10 mM Sodium Phosphate, 180 mM Sodium Chloride, and 0.001% (w/v) Pluronic F-68 (mixture pH of 7.3). The TFF system was subjected to a Recovery Flush (110% v/v of system holdup, 5-10 min recirculation) using the same diafiltration buffer. The Final TFF Recovery Flush was collected separately from the Final TFF Pool, and each pool was processed separately through 0.2 μm Filtration using an EMD Millipore Express SHCXL150 filter (≤1000 L/m² load challenge, ≤400 L/m²/hr flow rate, ≤30 psi). Filtered TFF Recovery Flush was added to Filtered TFF Pool, and then diluted as needed with diafiltration buffer, to provide a VRF Load Pool with viral concentration of 2.0-6.0×10¹² VG/mL, as measured by ddPCR.

### Virus Retentive Filtration (VRF)

[0869] A VRF Load Pool was processed through the Virus Retentive Filtration (VRF) using an Asahi Kasei Planova 35N filter (50.0-100.0 L/m² load challenge, 10 psi). The VRF filter and FF filters were both flushed before use (10 L/m², 240-300 LMH, 14 psi) with WFI water, then with 10 mM sodium phosphate, 180 mM sodium chloride, and 0.001% Pluronic F68 (mixture pH of 7.3).

[0870] The VRF filtration was followed by processing through a 0.2 μm Filtration using an EMD Millipore Express SHCXL150 filter (≤1000 L/m² load challenge, ≤30 psi), resulting in an VRF pool with a working viral concentration of 3.5-5.0×10¹² VG/mL, as measured by ddPCR.

### Downstream —Fill and Finish

[0871] A Pooled Drug Substance was transferred to a Biosafety Cabinet (BSC) and filtered through a EMD Millipore Millipak Gamma Gold 0.22 μm filter (dual-in-line sterilizing grade filters, ≤1000 L/m² load challenge, 200 LMH load flux, ≤60 psi differential pressure, ≤75 psi inlet pressure). The filtered Drug Substance pool comprised 10 mM sodium phosphate, 180 mM sodium chloride, and 0.001% Pluronic F68 (mixture pH of 7.3), with a target AAV concentration of 3.0-5.0×10¹² VG/mL, as measured by ddPCR. The filtered Drug Substance pool was then aseptically filled into 2 ml Cryovials (e.g., 2 mL Ompi Glass Vial, 1.8 ml fill volume, 1.6 ml extractable; or 1.2 ml fill volume, 1.0 ml extractable) utilizing a programmable Peristaltic dispensing pump within the BSC. Product vials were stoppered using a 13 mm West S2-F451 4432/50 stopper, seal with a 13 mm West Pharma Flip Off Long Matte Seal cap, 100% visually inspected and labeled (at 25° C.), and then stored at ≤−65° C.

[0872] Exemplary rAAV recoveries yielded by various steps of Example 5 are summarized below in Table 4:

TABLE 4
Exemplary rAAV recoveries

| | Concentration | | Recovery | | Batch Size |
|---|---|---|---|---|---|
| | (ddPCR, vg/mL) | | (ddPCR, % vg | | (L) |
| Process Pool | Expected | Range | Expected | Range | Expected |
| Crude Lysate, | 2 × 10¹¹ | 5 × l0¹⁰-5 × 10¹¹ | N/A | N/A | 235 |
| Post-Lysis | | | | | |
| Clarified Lysate | 2 × 10¹¹ | 4 × 10¹⁰-6 × 10¹¹ | 100% | 90%-110% | 250 |
| Immunoaffinity | 2 × 10¹² | 5 × 10¹¹-5 × 10¹² | 70% | 50%-90% | 10 |
| Chromatography | | | | | |
| Pool | | | | | |
| Anion Exchange | 2 × 10¹² | 5 × 10¹¹-5 × 10¹² | 95% | 80%-100% | 22 |
| Chromatography | | | | | |
| Pool | | | | | |
| Tangential Flow | 5 × 10¹² | 2.5 × 10¹²-6 × 10¹² | 70% | 50%-90% | 5 |
| Filtration Pool | | | | | |
| Viral Retentive | 5 × 10¹² | 2.5 × 10¹²-6 × 10¹² | 95% | 90%-100% | 5 |
| Filtration Pool | | | | | |
| Final Filtration | 5 × 10¹² | 2.5 × 10¹²-6 × 10¹² | 100% | 90%-100% | 5 |
| and Fill/DS | | | | | |

The application's sequence listing, which the Patent Office published only in electronic form, follows.

SEQUENCE LISTING (1783 sequences)

SEQ ID NO: 1 - protein, 743 aa, Artificial Sequence
  Synthetic polypeptide
MAADGYLPDWLEDNLSEGIREWWALKPGAPQPKANQQHQDNARGLVLPGYKYLGPGNGLDKGEPVNAADAAALEHDKAYDQQLKAGDNPYLKYNHADAEFQERLKEDTSFGGNLGRAVFQAKKRLLEPLGLVEEAAKTAPGKKRPVEQSPQEPDSSAGIGKSGAQPAKKRLNFGQTGDTESVPDPQPIGEPPAAPSGVGSLTMASGGGAPVADNNEGADGVGSSSGNWHCDSQWLGDRVITTSTRTWALPTYNNHLYKQISNSTSGGSSNDNAYFGYSTPWGYFDFNRFHCHFSPRDWQRLINNNWGFRPKRLNFKLFNIQVKEVTDNNGVKTIANNLTSTVQVFTDSDYQLPYVLGSAHEGCLPPFPADVFMIPQYGYLTLNDGSQAVGRSSFYCLEYFPSQMLRTGNNFQFSYEFENVPFHSSYAHSQSLDRLMNPLIDQYLYYLSRTINGSGQNQQTLKFSVAGPSNMAVQGRNYIPGPSYRQQRVSTTVTQNNNSEFAWPGASSWALNGRNSLMNPGPAMASHKEGEDRFFPLSGSLIFGKQGTGRDNVDADKVMITNEEEIKTTNPVATESYGQVATNHQSAQTLAVPFKAQAQTGWVQNQGILPGMVWQDRDVYLQGPIWAKIPHTDGNFHPSPLMGGFGMKHPPPQILIKNTPVPADPPTAFNKDKLNSFITQYSTGQVSVEIEWELQKENSKRWNPEIQYTSNYYKSNNVEFAVNTEGVYSEPRPIGTRYLTRNL

SEQ ID NO: 2 - DNA, 2232 bp, Artificial Sequence
  Synthetic polynucleotide
atggctgccgatggttatcttccagattggctcgaggacaaccttagtgaaggaattcgcgagtggtgggctttgaaacctggagcccctcaacccaaggcaaatcaacaacatcaagacaacgctcgaggtcttgtgcttccgggttacaaataccttggacccggcaacggactcgacaagggggagccggtcaacgcagcagacgcggcggccctcgagcacgacaaggcctacgaccagcagctcaaggccggagacaacccgtacctcaagtacaaccacgccgacgccgagttccaggagcggctcaaagaagatacgtcttttgggggcaacctcgggcgagcagtcttccaggccaaaaagaggcttcttgaacctcttggtctggttgaggaagcggctaagacggctcctggaaagaagaggcctgtagagcagtctcctcaggaaccggactcctccgcgggtattggcaaatcgggtgcacagcccgctaaaaagagactcaatttcggtcagactggcgacacagagtcagtcccagaccctcaaccaatcggagaacctcccgcagccccctcaggtgtgggatctcttacaatggcttcaggtggtggcgcaccagtggcagacaataacgaaggtgccgatggagtgggtagttcctcgggaaattggcattgcgattcccaatggctgggggacagagtcatcaccaccagcacccgaacctgggccctgcccacctacaacaatcacctctacaagcaaatctccaacagcacatctggaggatcttcaaatgacaacgcctacttcggctacagcaccccctgggggtattttgacttcaacagattccactgccacttctcaccacgtgactggcagcgactcatcaacaacaactggggattccggcctaagcgactcaacttcaagctcttcaacattcaggtcaaagaggttacggacaacaatggagtcaagaccatcgccaataaccttaccagcacggtccaggtcttcacggactcagactatcagctcccgtacgtgctcgggtcggctcacgagggctgcctcccgccgttcccagcggacgttttcatgattcctcagtacgggtatctgacgcttaatgatggaagccaggccgtgggtcgttcgtccttttactgcctggaatatttcccgtcgcaaatgctaagaacgggtaacaacttccagttcagctacgagtttgagaacgtacctttccatagcagctacgctcacagccaaagcctggaccgactaatgaatccactcatcgaccaatacttgtactatctctctagaactattaacggttctggacagaatcaacaaacgctaaaattcagtgtggccggacccagcaacatggctgtccagggaagaaactacatacctggacccagctaccgacaacaacgtgtctcaaccactgtgactcaaaacaacaacagcgaatttgcttggcctggagcttcttcttgggctctcaatggacgtaatagcttgatgaatcctggacctgctatggccagccacaaagaaggagaggaccgtttctttcctttgtctggatctttaatttttggcaaacaaggtaccggcagagacaacgtggatgcggacaaagtcatgataaccaacgaagaagaaattaaaactactaacccggtagcaacggagtcctatggacaagtggccacaaaccaccagagtgcccaaactttggcggtgccttttaaggcacaggcgcagaccggttgggttcaaaaccaaggaatacttccgggtatggtttggcaggacagagatgtgtacctgcaaggacccatttgggccaaaattcctcacacggacggcaactttcacccttctccgctgatgggagggtttggaatgaagcacccgcctcctcagatcctcatcaaaaacacacctgtacctgcggatcctccaacggccttcaacaaggacaagctgaactctttcatcacccagtattctactggccaagtcagcgtggagatcgagtgggagctgcagaaggaaaacagcaagcgctggaacccggagatccagtacacttccaactattacaagtctaataatgttgaatttgctgttaatactgaaggtgtatatagtgaaccccgccccattggcaccagatacctgactcgtaatctgtaa

SEQ ID NO: 3 - protein, 736 aa, Artificial Sequence
  Synthetic polypeptide
MAADGYLPDWLEDNLSEGIREWWALKPGAPQPKANQQHQDNARGLVLPGYKYLGPGNGLDKGEPVNAADAAALEHDKAYDQQLKAGDNPYLKYNHADAEFQERLKEDTSFGGNLGRAVFQAKKRLLEPLGLVEEAAKTAPGKKRPVEQSPQEPDSSAGIGKSGAQPAKKRLNFGQTGDTESVPDPQPIGEPPAAPSGVGSLTMASGGGAPVADNNEGADGVGSSSGNWHCDSQWLGDRVITTSTRTWALPTYNNHLYKQISNSTSGGSSNDNAYFGYSTPWGYFDFNRFHCHFSPRDWQRLINNNWGFRPKRLNFKLFNIQVKEVTDNNGVKTIANNLTSTVQVFTDSDYQLPYVLGSAHEGCLPPFPADVFMIPQYGYLTLNDGSQAVGRSSFYCLEYFPSQMLRTGNNFQFSYEFENVPFHSSYAHSQSLDRLMNPLIDQYLYYLSRTIQSSQTPRQTLKFSVAGPSNMAVQGRNYIPGPSYRQQRVSTTVTQNNNSEFAWPGASSWALNGRNSLMNPGPAMASHKEGEDRFFPLSGSLIFGKQGTGRDNVDADKVMITNEEEIKTTNPVATESYGQVATNHQSAQAQAQTGWVQNQGILPGMVWQDRDVYLQGPIWAKIPHTDGNFHPSPLMGGFGMKHPPPQILIKNTPVPADPPTAFNKDKLNSFITQYSTGQVSVEIEWELQKENSKRWNPEIQYTSNYYKSNNVEFAVNTEGVYSEPRPIGTRYLTRNL

SEQ ID NO: 4 - protein, 743 aa, Artificial Sequence
  Synthetic polypeptide
MAADGYLPDWLEDNLSEGIREWWALKPGAPQPKANQQHQDNARGLVLPGYKYLGPGNGLDKGEPVNAADAAALEHDKAYDQQLKAGDNPYLKYNHADAEFQERLKEDTSFGGNLGRAVFQAKKRLLEPLGLVEEAAKTAPGKKRPVEQSPQEPDSSAGIGKSGAQPAKKRLNFGQTGDTESVPDPQPIGEPPAAPSGVGSLTMASGGGAPVADNNEGADGVGSSSGNWHCDSQWLGDRVITTSTRTWALPTYNNHLYKQISNSTSGGSSNDNAYFGYSTPWGYFDFNRFHCHFSPRDWQRLINNNWGFRPKRLNFKLFNIQVKEVTDNNGVKTIANNLTSTVQVFTDSDYQLPYVLGSAHEGCLPPFPADVFMIPQYGYLTLNDGSQAVGRSSFYCLEYFPSQMLRTGNNFQFSYEFENVPFHSSYAHSQSLDRLMNPLIDQYLYYLSRTIILGTGTSQTLKFSVAGPSNMAVQGRNYIPGPSYRQQRVSTTVTQNNNSEFAWPGASSWALNGRNSLMNPGPAMASHKEGEDRFFPLSGSLIFGKQGTGRDNVDADKVMITNEEEIKTTNPVATESYGQVATNHQSAQTRTNPEAAQAQTGWVQNQGILPGMVWQDRDVYLQGPIWAKIPHTDGNFHPSPLMGGFGMKHPPPQILIKNTPVPADPPTAFNKDKLNSFITQYSTGQVSVEIEWELQKENSKRWNPEIQYTSNYYKSNNVEFAVNTEGVYSEPRPIGTRYLTRNL

SEQ ID NO: 5 - protein, 743 aa, Artificial Sequence
  Synthetic polypeptide
MAADGYLPDWLEDNLSEGIREWWALKPGAPQPKANQQHQDNARGLVLPGYKYLGPGNGLDKGEPVNAADAAALEHDKAYDQQLKAGDNPYLKYNHADAEFQERLKEDTSFGGNLGRAVFQAKKRLLEPLGLVEEAAKTAPGKKRPVEQSPQEPDSSAGIGKSGAQPAKKRLNFGQTGDTESVPDPQPIGEPPAAPSGVGSLTMASGGGAPVADNNEGADGVGSSSGNWHCDSQWLGDRVITTSTRTWALPTYNNHLYKQISNSTSGGSSNDNAYFGYSTPWGYFDFNRFHCHFSPRDWQRLINNNWGFRPKRLNFKLFNIQVKEVTDNNGVKTIANNLTSTVQVFTDSDYQLPYVLGSAHEGCLPPFPADVFMIPQYGYLTLNDGSQAVGRSSFYCLEYFPSQMLRTGNNFQFSYEFENVPFHSSYAHSQSLDRLMNPLIDQYLYYLSRTIILGTGTSQTLKFSVAGPSNMAVQGRNYIPGPSYRQQRVSTTVTQNNNSEFAWPGASSWALNGRNSLMNPGPAMASHKEGEDRFFPLSGSLIFGKQGTGRDNVDADKVMITNEEEIKTTNPVATESYGQVATNHQSAQNGGTSSSAQAQTGWVQNQGILPGMVWQDRDVYLQGPIWAKIPHTDGNFHPSPLMGGFGMKHPPPQILIKNTPVPADPPTAFNKDKLNSFITQYSTGQVSVEIEWELQKENSKRWNPEIQYTSNYYKSNNVEFAVNTEGVYSEPRPIGTRYLTRNL

SEQ ID NO: 6 - DNA, 2211 bp, Artificial Sequence
  Synthetic polynucleotide
atggctgccgatggttatcttccagattggctcgaggacaacctctctgagggcattcgcgagtggtgggacttgaaacctggagccccgaagcccaaagccaaccagcaaaagcaggacgacggccggggtctggtgcttcctggctacaagtacctcggacccttcaacggactcgacaagggggagcccgtcaacgcggcggacgcagcggccctcgagcacgacaaggcctacgaccagcagctcaaagcgggtgacaatccgtacctgcggtataaccacgccgacgccgagtttcaggagcgtctgcaagaagatacgtcttttgggggcaacctcgggcgagcagtcttccaggccaagaagcgggttctcgaacctctcggtctggttgaggaaggcgctaagacggctcctggaaagaaacgtccggtagagcagtcgccacaagagccagactcctcctcgggcatcggcaagacaggccagcagcccgctaaaaagagactcaattttggtcagactggcgactcagagtcagtccccgatccacaacctctcggagaacctccagcaacccccgctgctgtgggacctactacaatggcttcaggcggtggcgcaccaatggcagacaataacgaaggcgccgacggagtgggtaatgcctcaggaaattggcattgcgattccacatggctgggcgacagagtcatcaccaccagcacccgcacctgggccttgcccacctacaataaccacctctacaagcaaatctccagtgcttcaacgggggccagcaacgacaaccactacttcggctacagcaccccctgggggtattttgatttcaacagattccactgccacttttcaccacgtgactggcagcgactcatcaacaacaattggggattccggcccaagagactcaacttcaaactcttcaacatccaagtcaaggaggtcacgacgaatgatggcgtcacaaccatcgctaataaccttaccagcacggttcaagtcttctcggactcggagtaccagcttccgtacgtcctcggctctgcgcaccagggctgcctccctccgttcccggcggacgtgttcatgattccgcaatacggctacctgacgctcaacaatggcagccaagccgtgggacgttcatccttttactgcctggaatatttcccttctcagatgctgagaacgggcaacaactttaccttcagctacacctttgaggaagtgcctttccacagcagctacgcgcacagccagagcctggaccggctgatgaatcctctcatcgaccaatacctgtattacctgaacagaactcaaaatcagtccggaagtgcccaaaacaaggacttgctgtttagccgtgggtctccagctggcatgtctgttcagcccaaaaactggctacctggaccctgttatcggcagcagcgcgtttctaaaacaaaaacagacaacaacaacagcaattttacctggactggtgcttcaaaatataacctcaatgggcgtgaatccatcatcaaccctggcactgctatggcctcacacaaagacgacgaagacaagttctttcccatgagcggtgtcatgatttttggaaaagagagcgccggagcttcaaacactgcattggacaatgtcatgattacagacgaagaggaaattaaagccactaaccctgtggccaccgaaagatttgggaccgtggcagtcaatttccagagcagcagcacagaccctgcgaccggagatgtgcatgctatgggagcattacctggcatggtgtggcaagatagagacgtgtacctgcagggtcccatttgggccaaaattcctcacacagatggacactttcacccgtctcctcttatgggcggctttggactcaagaacccgcctcctcagatcctcatcaaaaacacgcctgttcctgcgaatcctccggcggagttttcagctacaaagtttgcttcattcatcacccaatactccacaggacaagtgagtgtggaaattgaatgggagctgcagaaagaaaacagcaagcgctggaatcccgaagtgcagtacacatccaattatgcaaaatctgccaacgttgattttactgtggacaacaatggactttatactgagcctcgccccattggcacccgttaccttacccgtcccctgtaa

SEQ ID NO: 7 - protein, 736 aa, Adeno-associated virus 1
MAADGYLPDWLEDNLSEGIREWWDLKPGAPKPKANQQKQDDGRGLVLPGYKYLGPFNGLDKGEPVNAADAAALEHDKAYDQQLKAGDNPYLRYNHADAEFQERLQEDTSFGGNLGRAVFQAKKRVLEPLGLVEEGAKTAPGKKRPVEQSPQEPDSSSGIGKTGQQPAKKRLNFGQTGDSESVPDPQPLGEPPATPAAVGPTTMASGGGAPMADNNEGADGVGNASGNWHCDSTWLGDRVITTSTRTWALPTYNNHLYKQISSASTGASNDNHYFGYSTPWGYFDFNRFHCHFSPRDWQRLINNNWGFRPKRLNFKLFNIQVKEVTTNDGVTTIANNLTSTVQVFSDSEYQLPYVLGSAHQGCLPPFPADVFMIPQYGYLTLNNGSQAVGRSSFYCLEYFPSQMLRTGNNFTFSYTFEEVPFHSSYAHSQSLDRLMNPLIDQYLYYLNRTQNQSGSAQNKDLLFSRGSPAGMSVQPKNWLPGPCYRQQRVSKTKTDNNNSNFTWTGASKYNLNGRESIINPGTAMASHKDDEDKFFPMSGVMIFGKESAGASNTALDNVMITDEEEIKATNPVATERFGTVAVNFQSSSTDPATGDVHAMGALPGMVWQDRDVYLQGPIWAKIPHTDGHFHPSPLMGGFGLKNPPPQILIKNTPVPANPPAEFSATKFASFITQYSTGQVSVEIEWELQKENSKRWNPEVQYTSNYAKSANVDFTVDNNGLYTEPRPIGTRYLTRPL

SEQ ID NO: 8 - DNA, 4718 bp, Adeno-associated virus serotype 1
ttgcccactccctctctgcgcgctcgctcgctcggtggggcctgcggaccaaaggtccgcagacggcagagctctgctctgccggccccaccgagcgagcgagcgcgcagagagggagtgggcaactccatcactaggggtaatcgcgaagcgcctcccacgctgccgcgtcagcgctgacgtaaattacgtcataggggagtggtcctgtattagctgtcacgtgagtgcttttgcgacattttgcgacaccacgtggccatttagggtatatatggccgagtgagcgagcaggatctccattttgaccgcgaaatttgaacgagcagcagccatgccgggcttctacgagatcgtgatcaaggtgccgagcgacctggacgagcacctgccgggcatttctgactcgtttgtgagctgggtggccgagaaggaatgggagctgcccccggattctgacatggatctgaatctgattgagcaggcacccctgaccgtggccgagaagctgcagcgcgacttcctggtccaatggcgccgcgtgagtaaggccccggaggccctcttctttgttcagttcgagaagggcgagtcctacttccacctccatattctggtggagaccacgggggtcaaatccatggtgctgggccgcttcctgagtcagattagggacaagctggtgcagaccatctaccgcgggatcgagccgaccctgcccaactggttcgcggtgaccaagacgcgtaatggcgccggaggggggaacaaggtggtggacgagtgctacatccccaactacctcctgcccaagactcagcccgagctgcagtgggcgtggactaacatggaggagtatataagcgcctgtttgaacctggccgagcgcaaacggctcgtggcgcagcacctgacccacgtcagccagacccaggagcagaacaaggagaatctgaaccccaattctgacgcgcctgtcatccggtcaaaaacctccgcgcgctacatggagctggtcgggtggctggtggaccggggcatcacctccgagaagcagtggatccaggaggaccaggcctcgtacatctccttcaacgccgcttccaactcgcggtcccagatcaaggccgctctggacaatgccggcaagatcatggcgctgaccaaatccgcgcccgactacctggtaggccccgctccgcccgcggacattaaaaccaaccgcatctaccgcatcctggagctgaacggctacgaacctgcctacgccggctccgtctttctcggctgggcccagaaaaggttcgggaagcgcaacaccatctggctgtttgggccggccaccacgggcaagaccaacatcgcggaagccatcgcccacgccgtgcccttctacggctgcgtcaactggaccaatgagaactttcccttcaatgattgcgtcgacaagatggtgatctggtgggaggagggcaagatgacggccaaggtcgtggagtccgccaaggccattctcggcggcagcaaggtgcgcgtggaccaaaagtgcaagtcgtccgcccagatcgaccccacccccgtgatcgtcacctccaacaccaacatgtgcgccgtgattgacgggaacagcaccaccttcgagcaccagcagccgttgcaggaccggatgttcaaatttgaactcacccgccgtctggagcatgactttggcaaggtgacaaagcaggaagtcaaagagttcttccgctgggcgcaggatcacgtgaccgaggtggcgcatgagttctacgtcagaaagggtggagccaacaaaagacccgcccccgatgacgcggataaaagcgagcccaagcgggcctgcccctcagtcgcggatccatcgacgtcagacgcggaaggagctccggtggactttgccgacaggtaccaaaacaaatgttctcgtcacgcgggcatgcttcagatgctgtttccctgcaagacatgcgagagaatgaatcagaatttcaacatttgcttcacgcacgggacgagagactgttcagagtgcttccccggcgtgtcagaatctcaaccggtcgtcagaaagaggacgtatcggaaactctgtgccattcatcatctgctggggcgggctcccgagattgcttgctcggcctgcgatctggtcaacgtggacctggatgactgtgtttctgagcaataaatgacttaaaccaggtatggctgccgatggttatcttccagattggctcgaggacaacctctctgagggcattcgcgagtggtgggacttgaaacctggagccccgaagcccaaagccaaccagcaaaagcaggacgacggccggggtctggtgcttcctggctacaagtacctcggacccttcaacggactcgacaagggggagcccgtcaacgcggcggacgcagcggccctcgagcacgacaaggcctacgaccagcagctcaaagcgggtgacaatccgtacctgcggtataaccacgccgacgccgagtttcaggagcgtctgcaagaagatacgtcttttgggggcaacctcgggcgagcagtcttccaggccaagaagcgggttctcgaacctctcggtctggttgaggaaggcgctaagacggctcctggaaagaaacgtccggtagagcagtcgccacaagagccagactcctcctcgggcatcggcaagacaggccagcagcccgctaaaaagagactcaattttggtcagactggcgactcagagtcagtccccgatccacaacctctcggagaacctccagcaacccccgctgctgtgggacctactacaatggcttcaggcggtggcgcaccaatggcagacaataacgaaggcgccgacggagtgggtaatgcctcaggaaattggcattgcgattccacatggctgggcgacagagtcatcaccaccagcacccgcacctgggccttgcccacctacaataaccacctctacaagcaaatctccagtgcttcaacgggggccagcaacgacaaccactacttcggctacagcaccccctgggggtattttgatttcaacagattccactgccacttttcaccacgtgactggcagcgactcatcaacaacaattggggattccggcccaagagactcaacttcaaactcttcaacatccaagtcaaggaggtcacgacgaatgatggcgtcacaaccatcgctaataaccttaccagcacggttcaagtcttctcggactcggagtaccagcttccgtacgtcctcggctctgcgcaccagggctgcctccctccgttcccggcggacgtgttcatgattccgcaatacggctacctgacgctcaacaatggcagccaagccgtgggacgttcatccttttactgcctggaatatttcccttctcagatgctgagaacgggcaacaactttaccttcagctacacctttgaggaagtgcctttccacagcagctacgcgcacagccagagcctggaccggctgatgaatcctctcatcgaccaatacctgtattacctgaacagaactcaaaatcagtccggaagtgcccaaaacaaggacttgctgtttagccgtgggtctccagctggcatgtctgttcagcccaaaaactggctacctggaccctgttatcggcagcagcgcgtttctaaaacaaaaacagacaacaacaacagcaattttacctggactggtgcttcaaaatataacctcaatgggcgtgaatccatcatcaaccctggcactgctatggcctcacacaaagacgacgaagacaagttctttcccatgagcggtgtcatgatttttggaaaagagagcgccggagcttcaaacactgcattggacaatgtcatgattacagacgaagaggaaattaaagccactaaccctgtggccaccgaaagatttgggaccgtggcagtcaatttccagagcagcagcacagaccctgcgaccggagatgtgcatgctatgggagcattacctggcatggtgtggcaagatagagacgtgtacctgcagggtcccatttgggccaaaattcctcacacagatggacactttcacccgtctcctcttatgggcggctttggactcaagaacccgcctcctcagatcctcatcaaaaacacgcctgttcctgcgaatcctccggcggagttttcagctacaaagtttgcttcattcatcacccaatactccacaggacaagtgagtgtggaaattgaatgggagctgcagaaagaaaacagcaagcgctggaatcccgaagtgcagtacacatccaattatgcaaaatctgccaacgttgattttactgtggacaacaatggactttatactgagcctcgccccattggcacccgttaccttacccgtcccctgtaattacgtgttaatcaataaaccggttgattcgtttcagttgaactttggtctcctgtccttcttatcttatcggttaccatggttatagcttacacattaactgcttggttgcgcttcgcgataaaagacttacgtcatcgggttacccctagtgatggagttgcccactccctctctgcgcgctcgctcgctcggtggggcctgcggaccaaaggtccgcagacggcagagctctgctctgccggccccaccgagcgagcgagcgcgcagagagggagtgggcaa

SEQ ID NO: 9 - DNA, 3131 bp, Artificial Sequence
  Synthetic polynucleotide
gcggccgcgaattcgcccttggctgcgtcaactggaccaatgagaactttcccttcaatgattgcgtcgacaagatggtgatctggtgggaggagggcaagatgacggccaaggtcgtggagtccgccaaggccattctcggcggcagcaaggtgcgcgtggaccaaaagtgcaagtcgtccgcccagatcgaccccacccccgtgatcgtcacctccaacaccaacatgtgcgccgtgattgacgggaacagcaccaccttcgagcaccagcagcctctccaggaccggatgtttaagttcgaactcacccgccgtctggagcacgactttggcaaggtgacaaagcaggaagtcaaagagttcttccgctgggccagtgatcacgtgaccgaggtggcgcatgagttttacgtcagaaagggcggagccagcaaaagacccgcccccgatgacgcggataaaagcgagcccaagcgggcctgcccctcagtcgcggatccatcgacgtcagacgcggaaggagctccggtggactttgccgacaggtaccaaaacaaatgttctcgtcacgcgggcatgcttcagatgctgtttccctgcaaaacgtgcgagagaatgaatcggaatttcaacatttgcttcacacacggggtcagagactgctcagagtgtttccccggcgtgtcagaatctcaaccggtcgtcagaaagaggacgtatcggaaactccgtgcgattcatcatctgctggggcgggctcccgagattgcttgctcggcctgcgatctggtcaacgtggacctggatgactgtgtttctgagcaataaatgacttaaaccaggtatggctgccgatggttatcttccagattggctcgaggacaacctctctgagggcattcgcgagtggtgggcgctgaaacctggagccccgaagcccaaagccaaccagcaaaagcaggacgacggccggggtctggtgcttcctggctacaagtacctcggacccttcaacggactcgacaagggggagcccgtcaacgcggcggacgcagcggccctcgagcacgacaaggcttacgaccagcagctgcaggcgggtgacaatccgtacctgcggtataaccacgccgacgccgagtttcaggagcgtctgcaagaagatacgtcttttgggggcaacctcgggcgagcagtcttccaggccaagaagcgggttctcgaacctctcggtctggttgaggaaggcgctaagacggctcctggaaagaagagaccggtagagccatcaccccagcgttctccagactcctctacgggcatcggcaagaaaggccaacagcccgccagaaaaagactcaattttggtcagactggcgactcagagtcagttccagaccctcaacctctcggagaacctccagcagcgccctctggtgtgggacctaatacaatggctgcaggcggtggcgcaccaatggcagacaataacgaaggcgccgacggagtgggtagttcctcgggaaattggcattgcgattccacatggctgggcgacagagtcatcaccaccagcacccgaacctgggccctgcccacctacaacaaccacctctacaagcaaatctccaacgggacatcgggaggagccaccaacgacaacacctacttcggctacagcaccccctgggggtattttgactttaacagattccactgccacctttcaccacgtgactggcagcgactcatcaacaacaactggggattccgacccaagagactcagcttcaagctcttcaacatccaggtcaaggaggtcacgcagaatgaaggcaccaagaccatcgccaataacctcaccagcaccatccaggtgtttacggactcggagtaccagctgccgtacgttctcggctctgtccaccagggctgcctgcctccgttcccggcggacgtgttcatgattccccagtacggctacctaacactcaacaacggtagtcaggccgtgggacgctcctccttctactgcctggaatactttccttcgcagatgctgagaaccggcaacaacttccagtttacttacaccttcgaggacgtgcctttccacagcagctacgcccacagctagagcttggaccggctgatgaatcctctgattgaccagtacctgtactacttgtctcggactcaaacaacaggaggcacggcaaatacgcagactctgggcttcagccaaggtgggcctaatacaatggccaatcaggcaaagaactggctgccaggaccctgttaccgccaacaacgcgtctcaacgacaaccgggcaaaacaacaatagcaactttgcctggactgctgggaccaaataccatctgaatggaagaaattcattggctaatcctggcatcgctatggcaacacacaaagacgacgaggagcgtttttttcccagtaacgggatcctgatttttggcaaacaaaatgctgccagagacaatgcggattacagcgatgtcatgctcaccagcgaggaagaaatcaaaaccactaaccctgtggctacagaggaatacggtatcgtggcagataacttgcagcagcaaaacacggctcctcaaattggaactgtcaacagccagggggccttacccggtatggtctggcagaaccgggacgtgtacctgcagggtcccatctgggccaagattcctcacacggacggcaacttccacccgtctccgctgatgggcggctttggcctgaaacatcctccgcctcagatcctgatcaagaacacgcctgtacctgcggatcctccgaccaccttcaaccagtcaaagctgaactctttcatcacgcaatacagcaccggacaggtcagcgtggaaattgaatgggagctgcagaaggaaaacagcaagcgctggaaccccgagatccagtacacctccaactactacaaatctataagtgtggactttgctgttaatacagaaggcgtgtactctgaaccccgccccattggcacccgttacctcacccgtaatctgtaattgcctgttaatcaataaaccggttgattcgtttcagttgaactttggtctctgcgaagggcgaattc

SEQ ID NO: 10 - DNA, 255 bp, Adeno-associated virus serotype 10
ggtaattcctccggaaattggcattgcgattccacatggctgggcgacagagtcatcaccaccagcacccgaacctgggtcctgcccacctacaacaaccacatctacaagcaaatctccagcgagacaggagccaccaacgacaaccactacttcggctacagcaccccctgggggtattttgactttaacagattccactgccacttttcaccacgtgactggcagcgactcatcaacaacaactggggattc

SEQ ID NO: 11 - protein, 738 aa, Adeno-associated virus 10
MAADGYLPDWLEDNLSEGIREWWDLKPGAPKPKANQQKQDDGRGLVLPGYKYLGPFNGLDKGEPVNAADAAALEHDKAYDQQLKAGDNPYLRYNHADAEFQERLQEDTSFGGNLGRAVFQAKKRVLEPLGLVEEAAKTAPGKKRPVEPSPQRSPDSSTGIGKKGQQPAKKRLNFGQTGESESVPDPQPIGEPPAGPSGLGSGTMAAGGGAPMADNNEGADGVGSSSGNWHCDSTWLGDRVITTSTRTWALPTYNNHLYKQISNGTSGGSTNDNTYFGYSTPWGYFDFNRFHCHFSPRDWQRLINNNWGFRPKRLSFKLFNIQVKEVTQNEGTKTIANNLTSTIQVFTDSEYQLPYVLGSAHQGCLPPFPADVFMIPQYGYLTLNNGSQAVGRSSFYCLEYFPSQMLRTGNNFEFSYTFEDVPFHSSYAHSQSLDRLMNPLIDQYLYYLSRTQSTGGTQGTQQLLFSQAGPANMSAQAKNWLPGPCYRQQRVSTTLSQNNNSNFAWTGATKYHLNGRDSLVNPGVAMATHKDDEERFFPSSGVLMFGKQGAGRDNVDYSSVMLTSEEEIKTTNPVATEQYGVVADNLQQANTGPIVGNVNSQGALPGMVWQNRDVYLQGPIWAKIPHTDGNFHPSPLMGGFGLKHPPPQILIKNTPVPADPPTTFSQAKLASFITQYSTGQVSVEIEWELQKENSKRWNPEIQYTSNYYKSTNVDFAVNTEGTYSEPRPIGTRYLTRNL

SEQ ID NO: 12 - protein, 738 aa, Adeno-associated virus 10
MAADGYLPDWLEDNLSEGIREWWDLKPGAPKPKANQQKQDDGRGLVLPGYKYLGPFNGLDKGEPVNAADAAALEHDKAYDQQLKAGDNPYLRYNHADAEFQERLQEDTSFGGNLGRAVFQAKKRVLEPLGLVEEGAKTAPGKKRPVEPSPQRSPDSSTGIGKKGQQPAKKRLNFGQTGDSESVPDPQPIGEPPAGPSGLGSGTMAAGGGAPMADNNEGADGVGSSSGNWHCDSTWLGDRVITTSTRTWALPTYNNHLYKQISNGTSGGSTNDNTYFGYSTPWGYFDFNRFHCHFSPRDWQRLINNNWGFRPKRLNFKLFNIQVKEVTQNEGTKTIANNLTSTIQVFTDSEYQLPYVLGSAHQGCLPPFPADVFMIPQYGYLTLNNGSQAVGRSSFYCLEYFPSQMLRTGNNFEFSYQFEDVPFHSSYAHSQSLDRLMNPLIDQYLYYLSRTQSTGGTAGTQQLLFSQAGPNNMSAQAKNWLPGPCYRQQRVSTTLSQNNNSNFAWTGATKYHLNGRDSLVNPGVAMATHKDDEERFFPSSGVLMFGKQGAGKDNVDYSSVMLTSEEEIKTTNPVATEQYGVVADNLQQQNAAPIVGAVNSQGALPGMVWQNRDVYLQGPIWAKIPHTDGNFHPSPLMGGFGLKHPPPQILIKNTPVPADPPTTFSQAKLASFITQYSTGQVSVEIEWELQKENSKRWNPEIQYTSNYYKSTNVDFAVNTDGTYSEPRPIGTRYLTRNL

SEQ ID NO: 13 - DNA, 258 bp, Adeno-associated virus serotype 11
ggtaattcctccggaaattggcattgcgattccacatggctgggcgacagagtcatcaccaccagcacccgaacctgggccctgccaacctacaacaaccacctctacaaacaaatctccagcgcttcaacgggggccagcaacgacaaccactactttggctacagcaccccctgggggtattttgactttaacagattccactgccacttctcaccacgtgactggcagcgactcatcaacaacaactggggattc

SEQ ID NO: 14 - DNA, 255 bp, Adeno-associated virus serotype 12
ggtaattcctccggaaattggcattgcgattccacatggctgggcgaccgagtcattaccaccagcacccggacttgggccctgcccacctacaacaaccacctctacaagcaaatctccagccaatcgggtgccaccaacgacaaccactacttcggctacagcaccccttgggggtattttgatttcaacagattccactgccatttctcaccacgtgactggcagcgactcatcaacaacaactggggattc

SEQ ID NO: 15 - DNA, 2208 bp, Adeno-associated virus serotype 2
atggctgccgatggttatcttccagattggctcgaggacactctctctgaaggaataagacagtggtggaagctcaaacctggcccaccaccaccaaagcccgcagagcggcataaggacgacagcaggggtcttgtgcttcctgggtacaagtacctcggacccttcaacggactcgacaagggagagccggtcaacgaggcagacgccgcggccctcgagcacgacaaagcctacgaccggcagctcgacagcggagacaacccgtacctcaagtacaaccacgccgacgcggagtttcaggagcgccttaaagaagatacgtcttttgggggcaacctcggacgagcagtcttccaggcgaaaaagagggttcttgaacctctgggcctggttgaggaacctgttaagacggctccgggaaaaaagaggccggtagagcactctcctgtggagccagactcctcctcgggaaccggaaaggcgggccagcagcctgcaagaaaaagattgaattttggtcagactggagacgcagactcagtacctgacccccagcctctcggacagccaccagcagccccctctggtctgggaactaatacgatggctacaggcagtggcgcaccaatggcagacaataacgagggcgccgacggagtgggtaattcctcgggaaattggcattgcgattccacatggatgggcgacagagtcatcaccaccagcacccgaacctgggccctgcccacctacaacaaccacctctacaaacaaatttccagccaatcaggagcctcgaacgacaatcactactttggctacagcaccccttgggggtattttgacttcaacagattccactgccacttttcaccacgtgactggcaaagactcatcaacaacaactggggattccgacccaagagactcaacttcaagctctttaacattcaagtcaaagaggtcacgcagaatgacggtacgacgacgattgccaataaccttaccagcacggttcaggtgtttactgactcggagtaccagctcccgtacgtcctcggctcggcgcatcaaggatgcctcccgccgttcccagcagacgtcttcatggtgccacagtatggatacctcaccctgaacaacgggagtcaggcagtaggacgctcttcattttactgcctggagtactttccttctcagatgctgcgtaccggaaacaactttaccttcagctacacttttgaggacgttcctttccacagcagctacgctcacagccagagtctggaccgtctcatgaatcctctcatcgaccagtacctgtattacttgagcagaacaaacactccaagtggaaccaccacgcagtcaaggcttcagttttctcaggccggagcgagtgacattcgggaccagtctaggaactggcttcctggaccctgttaccgccagcagcgagtatcaaagacatctgcggataacaacaacagtgaatactcgtggactggagctaccaagtaccacctcaatggcagagactctctggtgaatccgggcccggccatggcaagccacaaggacgatgaagaaaagttttttcctcagagcggggttctcatctttgggaagcaaggctcagagaaaacaaatgtggacattgaaaaggtcatgattacagacgaagaggaaatcaggacaaccaatcccgtggctacggagcagtatggttctgtatctaccaacctccagagaggcaacagacaagcagctaccgcagatgtcaacacacaaggcgttcttccaggcatggtctggcaggacagagatgtgtaccttcaggggcccatctgggcaaagattccacacacggacggacattttcacccctctcccctcatgggtggattcggacttaaacaccctcctccacagattctcatcaagaacaccccggtacctgcgaatccttcgaccaccttcagtgcggcaaagtttgcttccttcatcacacagtactccacgggacaggtcagcgtggagatcgagtgggagctgcagaaggaaaacagcaaacgctggaatcccgaaattcagtacacttccaactacaacaagtctgttaatgtggactttactgtggacactaatggcgtgtattcagagcctcgccccattggcaccagatacctgactcgtaatctgtaa

SEQ ID NO: 16 - protein, 735 aa, Adeno-associated virus 2
  MOD_RES (1)..(1): Xaa = Met, Gly, or none
XAADGYLPDWLEDTLSEGIRQWWKLKPGPPPPKPAERHKDDSRGLVLPGYKYLGPFNGLDKGEPVNEADAAALEHDKAYDRQLDSGDNPYLKYNHADAEFQERLKEDTSFGGNLGRAVFQAKKRVLEPLGLVEEPVKTAPGKKRPVEHSPVEPDSSSGTGKAGQQPARKRLNFGQTGDADSVPDPQPLGQPPAAPSGLGTNTMATGSGAPMADNNEGADGVGNSSGNWHCDSTWMGDRVITTSTRTWALPTYNNHLYKQISSQSGASNDNHYFGYSTPWGYFDFNRFHCHFSPRDWQRLINNNWGFRPKRLNFKLFNIQVKEVTQNDGTTTIANNLTSTVQVFTDSEYQLPYVLGSAHQGCLPPFPADVFMVPQYGYLTLNNGSQAVGRSSFYCLEYFPSQMLRTGNNFTFSYTFEDVPFHSSYAHSQSLDRLMNPLIDQYLYYLSRTNTPSGTTTQSRLQFSQAGASDIRDQSRNWLPGPCYRQQRVSKTSADNNNSEYSWTGATKYHLNGRDSLVNPGPAMASHKDDEEKFFPQSGVLIFGKQGSEKTNVDIEKVMITDEEEIRTTNPVATEQYGSVSTNLQRGNRQAATADVNTQGVLPGMVWQDRDVYLQGPIWAKIPHTDGHFHPSPLMGGFGLKHPPPQILIKNTPVPANPSTTFSAAKFASFITQYSTGQVSVEIEWELQKENSKRWNPEIQYTSNYNKSVNVDFTVDTNGVYSEPRPIGTRYLTRNL

SEQ ID NO: 17 - protein, 621 aa, Adeno-associated virus 2
MPGFYEIVIKVPSDLDGHLPGISDSFVNWVAEKEWELPPDSDMDLNLIEQAPLTVAEKLQRDFLTEWRRVSKAPEALFFVQFEKGESYFHMHVLVETTGVKSMVLGRFLSQIREKLIQRIYRGIEPTLPNWFAVTKTRNGAGGGNKVVDECYIPNYLLPKTQPELQWAWTNMEQYLSACLNLTERKRLVAQHLTHVSQTQEQNKENQNPNSDAPVIRSKTSARYMELVGWLVDKGITSEKQWIQEDQASYISFNAASNSRSQIKAALDNAGKIMSLTKTAPDYLVGQQPVEDISSNRIYKILELNGYDPQYAASVFLGWATKKFGKRNTIWLFGPATTGKTNIAEAIAHTVPFYGCVNWTNENFPFNDCVDKMVIWWEEGKMTAKVVESAKAILGGSKVRVDQKCKSSAQIDPTPVIVTSNTNMCAVIDGNSTTFEHQQPLQDRMFKFELTRRLDHDFGKVTKQEVKDFFRWAKDHVVEVEHEFYVKKGGAKKRPAPSDADISEPKRVRESVAQPSTSDAEASINYADRYQNKCSRHVGMNLMLFPCRQCERMNQNSNICFTHGQKDCLECFPVSESQPVSVVKKAYQKLCYIHHIMGKVPDACTACDLVNVDLDDCIFEQ

SEQ ID NO: 18 - DNA, 4675 bp, Adeno-associated virus serotype 2
ttggccactccctctctgcgcgctcgctcgctcactgaggccgggcgaccaaaggtcgcccgacgcccgggctttgcccgggcggcctcagtgagcgagcgagcgcgcagagagggagtggccaactccatcactaggggttcctggaggggtggagtcgtgacgtgaattacgtcatagggttagggaggtcctgtattagaggtcacgtgagtgttttgcgacattttgcgacaccatgtggtcacgctgggtatttaagcccgagtgagcacgcagggtctccattttgaagcgggaggtttgaacgcgcagccgccatgccggggttttacgagattgtgattaaggtccccagcgaccttgacgggcatctgcccggcatttctgacagctttgtgaactgggtggccgagaaggaatgggagttgccgccagattctgacatggatctgaatctgattgagcaggcacccctgaccgtggccgagaagctgcagcgcgactttctgacggaatggcgccgtgtgagtaaggccccggaggcccttttctttgtgcaatttgagaagggagagagctacttccacatgcacgtgctcgtggaaaccaccggggtgaaatccatggttttgggacgtttcctgagtcagattcgcgaaaaactgattcagagaatttaccgcgggatcgagccgactttgccaaactggttcgcggtcacaaagaccagaaatggcgccggaggcgggaacaaggtggtggatgagtgctacatccccaattacttgctccccaaaacccagcctgagctccagtgggcgtggactaatatggaacagtatttaagcgcctgtttgaatctcacggagcgtaaacggttggtggcgcagcatctgacgcacgtgtcgcagacgcaggagcagaacaaagagaatcagaatcccaattctgatgcgccggtgatcagatcaaaaacttcagccaggtacatggagctggtcgggtggctcgtggacaaggggattacctcggagaagcagtggatccaggaggaccaggcctcatacatctccttcaatgcggcctccaactcgcggtcccaaatcaaggctgccttggacaatgcgggaaagattatgagcctgactaaaaccgcccccgactacctggtgggccagcagcccgtggaggacatttccagcaatcggatttataaaattttggaactaaacgggtacgatccccaatatgcggcttccgtctttctgggatgggccacgaaaaagttcggcaagaggaacaccatctggctgtttgggcctgcaactaccgggaagaccaacatcgcggaggccatagcccacactgtgcccttctacgggtgcgtaaactggaccaatgagaactttcccttcaacgactgtgtcgacaagatggtgatctggtgggaggaggggaagatgaccgccaaggtcgtggagtcggccaaagccattctcggaggaagcaaggtgcgcgtggaccagaaatgcaagtcctcggcccagatagacccgactcccgtgatcgtcacctccaacaccaacatgtgcgccgtgattgacgggaactcaacgaccttcgaacaccagcagccgttgcaagaccggatgttcaaatttgaactcacccgccgtctggatcatgactttgggaaggtcaccaagcaggaagtcaaagactttttccggtgggcaaaggatcacgtggttgaggtggagcatgaattctacgtcaaaaagggtggagccaagaaaagacccgcccccagtgacgcagatataagtgagcccaaacgggtgcgcgagtcagttgcgcagccatcgacgtcagacgcggaagcttcgatcaactacgcagacaggtaccaaaacaaatgttctcgtcacgtgggcatgaatctgatgctgtttccctgcagacaatgcgagagaatgaatcagaattcaaatatctgcttcactcacggacagaaagactgtttagagtgctttcccgtgtcagaatctcaacccgtttctgtcgtcaaaaaggcgtatcagaaactgtgctacattcatcatatcatgggaaaggtgccagacgcttgcactgcctgcgatctggtcaatgtggatttggatgactgcatctttgaacaataaatgatttaaatcaggtatggctgccgatggttatcttccagattggctcgaggacactctctctgaaggaataagacagtggtggaagctcaaacctggcccaccaccaccaaagcccgcagagcggcataaggacgacagcaggggtcttgtgcttcctgggtacaagtacctcggacccttcaacggactcgacaagggagagccggtcaacgaggcagacgccgcggccctcgagcacgtacaaagcctacgaccggcagctcgacagcggagacaacccgtacctcaagtacaaccacgccgacgcggagtttcaggagcgccttaaagaagatacgtcttttgggggcaacctcggacgagcagtcttccaggcgaaaaagagggttcttgaacctctgggcctggttgaggaacctgttaagacggctccgggaaaaaagaggccggtagagcactctcctgtggagccagactcctcctcgggaaccggaaaggcgggccagcagcctgcaagaaaaagattgaattttggtcagactggagacgcagactcagtacctgacccccagcctctcggacagccaccagcagccccctctggtctgggaactaatacgatggctacaggcagtggcgcaccaatggcagacaataacgagggcgccgacggagtgggtaattcctccggaaattggcattgcgattccacatggatgggcgacagagtcatcaccaccagcacccgaacctgggccctgcccacctacaacaaccacctctacaaacaaatttccagccaatcaggagcctcgaacgacaatcactactttggctacagcaccccttgggggtattttgacttcaacagattccactgccacttttcaccacgtgactggcaaagactcatcaacaacaactggggattccgacccaagagactcaacttcaagctctttaacattcaagtcaaagaggtcacgcagaatgacggtacgacgacgattgccaataaccttaccagcacggttcaggtgtttactgactcggagtaccagctcccgtacgtcctcggctcggcgcatcaaggatgcctcccgccgttcccagcagacgtcttcatggtgccacagtatggatacctcaccctgaacaacgggagtcaggcagtaggacgctcttcattttactgcctggagtactttccttctcagatgctgcgtaccggaaacaactttaccttcagctacacttttgaggacgttcctttccacagcagctacgctcacagccagagtctggaccgtctcatgaatcctctcatcgaccagtacctgtattacttgagcagaacaaacactccaagtggaaccaccacgcagtcaaggcttcagttttctcaggccggagcgagtgacattcgggaccagtctaggaactggcttcctggaccctgttaccgccagcagcgagtatcaaagacatctgcggataacaacaacagtgaatactcgtggactggagctaccaagtaccacctcaatggcagagactctctggtgaatccggccatggcaagccacaaggacgatgaagaaaagttttttcctcagagcggggttctcatctttgggaagcaaggctcagagaaaacaaatgtgaacattgaaaaggtcatgattacagacgaagaggaaatcggaacaaccaatcccgtggctacggagcagtatggttctgtatctaccaacctccagagaggcaacagacaagcagctaccgcagatgtcaacacacaaggcgttcttccaggcatggtctggcaggacagagatgtgtaccttcaggggcccatctgggcaaagattccacacacggacggacattttcacccctctcccctcatgggtggattcggacttaaacaccctcctccacagattctcatcaagaacaccccggtacctgcgaatccttcgaccaccttcagtgcggcaaagtttgcttccttcatcacacagtactccacgggacacggtcagcgtggagatcgagtgggagctgcagaaggaaaacagcaaacgctggaatcccgaaattcagtacacttccaactacaacaagtctgttaatcgtggacttaccgtggatactaatggcgtgtattcagagcctcgccccattggcaccagatacctgactcgtaatctgtaattgcttgttaatcaataaaccgtttaattcgtttcagttgaactttggtctctgcgtatttctttcttatctagtttccatggctacgtagataagtagcatggcgggttaatcattaactacaaggaacccctagtgatggagttggccactccctctctgcgcgctcgctcgctcactgaggccgggcgaccaaaggtcgcccgacgcccgggctttgcccgggcggcctcagtgagcgagcgagcgcgcagagagggagtggccaa

SEQ ID NO: 19 - DNA, 4679 bp, Adeno-associated virus 2
ttggccactccctctctgcgcgctcgctcgctcactgaggccgggcgaccaaaggtcgcccgacgcccgggctttgcccgggcggcctcagtgagcgagcgagcgcgcagagagggagtggccaactccatcactaggggttcctggaggggtggagtcgtgacgtgaattacgtcatagggttagggaggtcctgtattagaggtcacgtgagtgttttgcgacattttgcgacaccatgtggtcacgctgggtatttaagcccgagtgagcacgcagggtctccattttgaagcgggaggtttgaacgcgcagccgccatgccggggttttacgagattgtgattaaggtccccagcgaccttgacgggcatctgcccggcatttctgacagctttgtgaactgggtggccgagaaggaatgggagttgccgccagattctgacatggatctgaatctgattgagcaggcacccctgaccgtggccgagaagctgcagcgcgactttctgacggaatggcgccgtgtgagtaaggccccggaggcccttttctttgtgcaatttgagaagggagagagctacttccacatgcacgtgctcgtggaaaccaccggggtgaaatccatggttttgggacgtttcctgagtcagattcgcgaaaaactgattcagagaatttaccgcgggatcgagccgactttgccaaactggttcgcggtcacaaagaccagaaatggcgccggaggcgggaacaaggtggtggatgagtgctacatccccaattacttgctccccaaaacccagcctgagctccagtgggcgtggactaatatggaacagtatttaagcgcctgtttgaatctcacggagcgtaaacggttggtggcgcagcatctgacgcacgtgtcgcagacgcaggagcagaacaaagagaatcagaatcccaattctgatgcgccggtgatcagatcaaaaacttcagccaggtacatggagctggtcgggtggctcgtggacaaggggattacctcggagaagcagtggatccaggaggaccaggcctcatacatctccttcaatgcggcctccaactcgcggtcccaaatcaaggctgccttggacaatgcgggaaagattatgagcctgactaaaaccgcccccgactacctggtgggccagcagcccgtggaggacatttccagcaatcggatttataaaattttggaactaaacgggtacgatccccaatatgcggcttccgtctttctgggatgggccacgaaaaagttcggcaagaggaacaccatctggctgtttgggcctgcaactaccgggaagaccaacatcgcggaggccatagcccacactgtgcccttctacgggtgcgtaaactggaccaatgagaactttcccttcaacgactgtgtcgacaagatggtgatctggtgggaggaggggaagatgaccgccaaggtcgtggagtcggccaaagccattctcggaggaagcaaggtgcgcgtggaccagaaatgcaagtcctcggcccagatagacccgactcccgtgatcgtcacctccaacaccaacatgtgcgccgtgattgacgggaactcaacgaccttcgaacaccagcagccgttgcaagaccggatgttcaaatttgaactcacccgccgtctggatcatgactttgggaaggtcaccaagcaggaagtcaaagactttttccggtgggcaaaggatcacgtggttgaggtggagcatgaattctacgtcaaaaagggtggagccaagaaaagacccgcccccagtgacgcagatataagtgagcccaaacgggtgcgcgagtcagttgcgcagccatcgacgtcagacgcggaagcttcgatcaactacgcagacaggtaccaaaacaaatgttctcgtcacgtgggcatgaatctgatgctgtttccctgcagacaatgcgagagaatgaatcagaattcaaatatctgcttcactcacggacagaaagactgtttagagtgctttcccgtgtcagaatctcaacccgtttctgtcgtcaaaaaggcgtatcagaaactgtgctacattcatcatatcatgggaaaggtgccagacgcttgcactgcctgcgatctggtcaatgtggatttggatgactgcatctttgaacaataaatgatttaaatcaggtatggctgccgatggttatcttccagattggctcgaggacactctctctgaaggaataagacagtggtggaagctcaaacctggcccaccaccaccaaagcccgcagagcggcataaggacgacagcaggggtcttgtgcttcctgggtacaagtacctcggacccttcaacggactcgacaagggagagccggtcaacgaggcagacgccgcggccctcgagcacgacaaagcctacgaccggcagctcgacagcggagacaacccgtacctcaagtacaaccacgccgacgcggagtttcaggagcgccttaaagaagatacgtcttttgggggcaacctcggacgagcagtcttccaggcgaaaaagagggttcttgaacctctgggcctggttgaggaacctgttaagacggctccgggaaaaaagaggccggtagagcactctcctgtggagccagactcctcctcgggaaccggaaaggcgggccagcagcctgcaagaaaaagattgaattttggtcagactggagacgcagactcagtacctgacccccagcctctcggacagccaccagcagccccctctggtctgggaactaatacgatggctacaggcagtggcgcaccaatggcagacaataacgagggcgccgacggagtgggtaattcctccggaaattggcattgcgattccacatggatgggcgacagagtcatcaccaccagcacccgaacctgggccctgcccacctacaacaaccacctctacaaacaaatttccagccaatcaggagcctcgaacgacaatcactactttggctacagcaccccttgggggtattttgacttcaacagattccactgccacttttcaccacgtgactggcaaagactcatcaacaacaactggggattccgacccaagagactcaacttcaagctctttaacattcaagtcaaagaggtcacgcagaatgacggtacgacgacgattgccaataaccttaccagcacggttcaggtgtttactgactcggagtaccagctcccgtacgtcctcggctcggcgcatcaaggatgcctcccgccgttcccagcagacgtcttcatggtgccacagtatggatacctcaccctgaacaacgggagtcaggcagtaggacgctcttcattttactgcctggagtactttccttctcagatgctgcgtaccggaaacaactttaccttcagctacacttttgaggacgttcctttccacagcagctacgctcacagccagagtctggaccgtctcatgaatcctctcatcgaccagtacctgtattacttgagcagaacaaacactccaagtggaaccaccacgcagtcaaggcttcagttttctcaggccggagcgagtgacattcgggaccagtctaggaactggcttcctggaccctgttaccgccagcagcgagtatcaaagacatctgcggataacaacaacagtgaatactcgtggactggagctaccaagtaccacctcaatggcagagactctctggtgaatccgggcccggccatggcaagccacaaggacgatgaagaaaagttttttcctcagagcggggttctcatctttgggaagcaaggctcagagaaaacaaatgtggacattgaaaaggtcatgattacagacgaagaggaaatcaggacaaccaatcccgtggctacggagcagtatggttctgtatctaccaacctccagagaggcaacagacaagcagctaccgcagatgtcaacacacaaggcgttcttccaggcatggtctggcaggacagagatgtgtaccttcaggggcccatctgggcaaagattccacacacggacggacattttcacccctctcccctcatgggtggattcggacttaaacaccctcctccacagattctcatcaagaacaccccggtacctgcgaatccttcgaccaccttcagtgcggcaaagtttgcttccttcatcacacagtactccacgggacaggtcagcgtggagatcgagtgggagctgcagaaggaaaacagcaaacgctggaatcccgaaattcagtacacttccaactacaacaagtctgttaatgtggactttactgtggacactaatggcgtgtattcagagcctcgccccattggcaccagatacctgactcgtaatctgtaattgcttgttaatcaataaaccgtttaattcgtttcagttgaactttggtctctgcgtatttctttcttatctagtttccatggctacgtagataagtagcatggcgggttaatcattaactacaaggaacccctagtgatggagttggccactccctctctgcgcgctcgctcgctcactgaggccgggcgaccaaaggtcgcccgacgcccgggctttgcccgggcggcctcagtgagcgagcgagcgcgcagagagggagtggccaa

SEQ ID NO: 20 - protein, 725 aa, Adeno-associated virus 5
MAADGYLPDWLEDTLSEGIRQWWKLKPGPPPPKPAERHKDDSRGLVLPGYKYLGPFNGLDKGEPVNEADAAALEHDKAYDRQLDSGDNPYLKYNHADAEFQERLKEDTSFGGNLGRAVFQAKKRVLEPFGLVEEGAKTAPTGKRIDDHFPKRKKARTEEDSKPSTSSDAEAGPSGSQQLQIPAQPASSLGADTMSAGGGGPLGDNNQGADGVGNASGDWHCDSTWMGDRVVTKSTRTWVLPSYNNHQYREIKSGSVDGSNANAYFGYSTPWGYFDFNRFHSHWSPRDWQRLINNYWGFRPRSLRVKIFNIQVKEVTVQDSTTTIANNLTSTVQVFTDDDYQLPYVVGNGTEGCLPAFPPQVFTLPQYGYATLNRDNTENPTERSSFFCLEYFPSKMLRTGNNFEFTYNFEEVPFHSSFAPSQNLFKLANPLVDQYLYRFVSTNNTGGVQFNKNLAGRYANTYKNWFPGPMGRTQGWNLGSGVNRASVSAFATTNRMELEGASYQVPPQPNGMTNNLQGSNTYALENTMIFNSQPANPGTTATYLEGNMLITSESETQPVNRVAYNVGGQMATNNQSSTTAPTTGTYNLQEIVPGSVWMERDVYLQGPIWAKIPETGAHFHPSPAMGGFGLKHPPPMMLIKNTPVPGNITSFSDVPVSSFITQYSTGQVTVEMEWELKKENSKRWNPEIQYTNNYNDPQFVDFAPDSTGEYRTTRPIGTRYLTRPL

SEQ ID NO: 21 - protein, 644 aa, Artificial Sequence
  Synthetic polypeptide
  MOD_RES (434)..(434): Any amino acid
KAYDQQLKAGDNPYLRYNHADAEFQERLQEDTSFGGNLGRAVFQAKKRVLEPLGLVETPAKTAPGKKRPVDSPDSTSGIGKKGQQPAKKRLNFGQTGDSESVPDPQPIGEPPAGPSGLGSGTMAAGGGAPMADNNEGADGVGNASGNWHCDSTWLGDRVITTSTRTWALPTYNNHLYKQISSQSAGSTNDNVYFGYSTPWGYFDFNRFHCHFSPRDWQRLINNNWGFRPKKLNFKLFNIQVKEVTTNDGVTTIANNLTSTVQVFSDSEYQLPYVLGSAHQGCLPPFPADVFMIPQYGYLTLNNGSQSVGRSSFYCLEYFPSQMLRTGNNFTFSYTFEDVPFHSSYAHSQSLDRLMNPLIDQYLYYLARTQSNAGGTAGNRELQFYQGGPTTMAEQAKNWLPGPCFRQQRVSKTLDQNNNSNFAWTGATKYHLNXRNSLVNPGVAMATHKDDEERFFPSSGVLIFGKTGAANKTTLENVLMTNEEEIRPTNPVATEEYGIVSSNLQAASTAAQTQVVNNQGALPGMVWQNRDVYLQGPIWAKIPHTDGNFHPSPLMGGFGLKHPPPQILIKNTPVPANPPEVFTPAKFASFITQYSTGQVSVEIEWELQKENSKRWNPEIQYTSNFDKQTGVDFAVDSQGVYSEP

SEQ ID NO: 22 - DNA, 1933 bp, Artificial Sequence
  Synthetic polynucleotide
caaggcctacgaccagcagctcaaagcgggtgacaatccgtacctgcggtataaccacgccgacgccgagtttcaggagtgtcttcaagaagatacgtcttttgggggcaacctcgggcgagcagtcttccaggccaaaaagcgggttctcgaacctcttggtctggttgagacgccagctaagacggcacctggaaagaagcgaccggtagactcgccagactccacctcgggcatcggcaagaaaggccagcagcccgcgaaaaagagactcaactttgggcagactggcgactcagagtcagtccccgaccctcaaccaatcggagaaccaccagcaggcccctctggtctgggatctggtacaatggttgcaggcggtggcgcaccaatggctgacaataacgagggcgccgacggagtgggtaatgcctcaggaaattggcattgcgattccacatggctgggcgacagagtcatcaccaccagcacccgaacctgggccctgcccacctacaacaaccacctctacaagcaaatctccagtcagtcagcagggagcaccaacgataacgtctatttcggctacagcaccccctgggggtattttgacttcaacagattccattgccacttctcaccacgtgactggcagcgacttatcaacaacaactggggattccggcccaagaagctcaacttcaagctcttcaacatccaggtcaaggaggtcacgacgaatgacggtgtcacaaccatcgctaataaccttaccagcacggttcaggtcttttcggactcggaatatcaactgccgtacgtcctcggctccgcgcaccagggctgcctgcctccgttcccggcagacgtgttcatgattccgcagtacggatacctgactctgaacaatggcagccaatcggtaggccgttcctccttctactgcctggagtactttccttctcagatgctgagaacgggcaacaacttcacctttagctacaccttcgaggacgtgcctttccacagcagctacgcgcacagccagagtctggaccggctgatgaatcccctcatcgaccagtacctgtactacttggccagaacacagagcaacgcaggaggtactgctggcaatcgggaactgcagttttatcagggcggacctaccaccatggccgaacaagcaaagaactggctgcccggaccttgcttccggcaacagagagtatccaagacgctggatcaaaataacaacagcaactttgcctggactggtgccacaaaataccatttaaatggaagaaattcattggttaatcccggtgtcgccatggcaacccacaaggacgacgaggaacgcttctccccttcgagcggagttctaatttttggcaaaactggagcagctaataaaactacattagaaaacgtgctcatgacaaatgaagaagaaattcgtcctaccaacccggtagctaccgaggaatacgggattgtaagcagcaacttgcaggcggctagcaccgcagcccagacacaagttgttaacaaccagggagccttacctggcatggtctggcagaaccgggacgtgtacctgcaaggtcccatttgggccaagattcctcacacggacggcaactttcacccgtctcctctaatgggtggctttggactgaaacacccgcctccccagatcctgatcaaaaacacgccggtacctgctaatcctccagaagtgtttactcctgccaagtttgcttccttcatcacgcagtacagcaccgggcaagtcagcgttgagatcgagtgggagctgcagaaagagaacagcaagcgctggaacccagagattcagtacacctccaactttgacaaacagactggagtggactttgctgttgacagccagggtgtttactctgagcct

SEQ ID NO: 23 - protein, 644 aa, Artificial Sequence
  Synthetic polypeptide
KAYDQQLKAGDNPYLRYNHADAEFQECLQEDTSFGGNLGRAVFQAKKRVLEPLGLVETPAKTAPGKKRPVDSPDSTSGIGKKGQQPAKKRLNFGQTGDSESVPDPQPIGEPPAGPSGLGSGTMVAGGGAPMADNNEGADGVGNASGNWHCDSTWLGDRVITTSTRTWALPTYNNHLYKQISSQSAGSTNDNVYFGYSTPWGYFDFNRFHCHFSPRDWQRLINNNWGFRPKKLNFKLFNIQVKEVTTNDGVTTIANNLTSTVQVFSDSEYQLPYVLGSAHQGCLPPFPADVFMIPQYGYLTLNNGSQSVGRSSFYCLEYFPSQMLRTGNNFTFSYTFEDVPFHSSYAHSQSLDRLMNPLIDQYLYYLARTQSNAGGTAGNRELQFYQGGPTTMAEQAKNWLPGPCFRQQRVSKTLDQNNNSNFAWTGATKYHLNGRNSLVNPGVAMATHKDDEERFSPSSGVLIFGKTGAANKTTLENVLMTNEEEIRPTNPVATEEYGIVSSNLQAASTAAQTQVVNNQGALPGMVWQNRDVYLQGPIWAKIPHTDGNFHPSPLMGGFGLKHPPPQILIKNTPVPANPPEVFTPAKFASFITQYSTGQVSVEIEWELQKENSKRWNPEIQYTSNFDKQTGVDFAVDSQGVYSEP

SEQ ID NO: 24 - DNA, 1933 bp, Artificial Sequence
  Synthetic polynucleotide
caaggcctacgaccagcagctcaaagcgggtgacaatccgtacctgcggtataaccacgccgacgccgagtttcaggagcgtcttcaagaagatacgtcttttgggggcaacctcgggcgagcagtcttccaggccaaaaagcgggttctcgaacctcttggtctggttgagacgccagctaagacggcacctggaaagaagcgaccggtagactcgccagactccacctcgggcatcggcaagaaaggccagcagcccgcgaaaaagagactcaactttgggcagactggcgactcagagccagtccccgaccctcaaccaatcggagaaccaccagcaggcccctctggtctgggatctggtacaatggctgcaggcggtggcgcaccaatggctgacaataacgagggcgccgacggagtgggtaatgcctcaggaaattggcattgcgattccacacggctgggcgacagagtcatcaccaccagcacccgaacctgggccctgcccacctacaacaaccacctctacaagcaaatctccagtcagtcagcagggagcaccaacgataacgtctatttcggctacagcaccccctgggggtattttgacttcaacagattccattgccacttctcaccacgtgactggcagcgacttatcaacaacaactggggattccggcccaagaagctcaacttcaagctcttcaacatccaggtcaaggaggtcacgacgaatgacggcgtcacaaccatcgctaataaccttaccagcacggttcaggtcttttcggactcggaatatcaactgccgtacgtcctcggctccgcgcaccagggctgcctgcctccgttcccggcagacgtgttcatgattccgcagtacggatacctgactctgaacaatggcagccaatcggtaggccgttcctccttctactgcctggagtactttccttctcagatgctgagaacgggcaacaacttcacctttagctacaccttcgaggacgtgcctttccacagcagctacgcgcacagccagagtctgggccggctgatgaatcccctcatcgaccagtacctgtactacttggccagaacacagagcaacgcaggaggtactgctggcaatcgggaactgcagttttatcagggcggacctaccaccatggccgaacaagcaaagaactggctgcccggaccttgcttccggcaacagagagtatccaagacgctggatcaaaataacaacagcaactttgcctggactggtgccacaaaataccatttaaatggaagaaattcattggttaatcccggtgtcgccatggcaacccacaaggacgacgaggaacgcttcttcccttcgagcggagttctaatttttggcaaaactggagcagctaataaaactacattagaaaacgtgctcatgacaaatgaagaagaaattcgtcctaccaacccggtagctaccgaggaatacgggattgtaagcagcaacttgcaggcggctagcaccgcagcccagacacaagttgttaacaaccagggagccttacctggcatggtctggcagaaccgggacgtgtacctgcaaggtcccatttgggccaagattcctcacacggacggcaactttcacccgtctcctctaatgggtggctttggactgaaacacccgcctccccagatcctgatcaaaaacacaccggtacctgctaatcctccagaagtgtttactcctgccaagtttgcttccttcatcacgcagtacagcaccgggcaagtcagcgttgagatcgaatgggagctgcagaaagagaacagcaagcgctggaacccagagattcagtacacctccaactttgacaaacagactggagtggactttgctgttgacagccagggtgtttactctgagcct

SEQ ID NO: 25 - protein, 644 aa, Artificial Sequence
  Synthetic polypeptide
KAYDQQLKAGDNPYLRYNHADAEFQERLQEDTSFGGNLGRAVFQAKKRVLEPLGLVETPAKTAPGKKRPVDSPDSTSGIGKKGQQPAKKRLNFGQTGDSEPVPDPQPIGEPPAGPSGLGSGTMAAGGGAPMADNNEGADGVGNASGNWHCDSTRLGDRVITTSTRTWALPTYNNHLYKQISSQSAGSTNDNVYFGYSTPWGYFDFNRFHCHFSPRDWQRLINNNWGFRPKKLNFKLFNIQVKEVTTNDGVTTIANNLTSTVQVFSDSEYQLPYVLGSAHQGCLPPFPADVFMIPQYGYLTLNNGSQSVGRSSFYCLEYFPSQMLRTGNNFTFSYTFEDVPFHSSYAHSQSLGRLMNPLIDQYLYYLARTQSNAGGTAGNRELQFYQGGPTTMAEQAKNWLPGPCFRQQRVSKTLDQNNNSNFAWTGATKYHLNGRNSLVNPGVAMATHKDDEERFFPSSGVLIFGKTGAANKTTLENVLMTNEEEIRPTNPVATEEYGIVSSNLQAASTAAQTQVVNNQGALPGMVWQNRDVYLQGPIWAKIPHTDGNFHPSPLMGGFGLKHPPPQILIKNTPVPANPPEVFTPAKFASFITQYSTGQVSVEIEWELQKENSKRWNPEIQYTSNFDKQTGVDFAVDSQGVYSEP

SEQ ID NO: 26 - DNA, 1933 bp, Artificial Sequence; identical to SEQ ID NO: 24
  Synthetic polynucleotide

SEQ ID NO: 27 - protein, 644 aa, Artificial Sequence; identical to SEQ ID NO: 25
  Synthetic polypeptide

SEQ ID NO: 28 - DNA, 1933 bp, Artificial Sequence
  Synthetic polynucleotide
caaggcctacgaccagcagctcaaagcgggtgacaatccgtacctgcggtataaccacgccgacgccgagtttcaggagcgtcttcaagaagatacgtcttttgggggcaacctcgggcgagcagtcttccaggccaaaaagcgggttctcgaacctcttggtctggttgagacgccagctaagacggcacctggaaagaagcgaccggtagactcgccagactccacctcgggcatcggcaagaaaggccagcagcccgcgaaaaagagactcaactttgggcagactggcgactcagagtcagtccccgaccctcaaccaatcggagaaccaccagcaggcccctctggtctgggatctggtacaatggctgcaggcggtggcgcaccaatggctgacaatagcgagggcgccgacggagtgggtaatgcctcaggaaattggcattgcgattccacatggctgggcgacagagtcatcaccaccagcacccgaacctgggccctgcccacctacaacaaccacctctacaagcaaatctccagtcagtcagcagggagcaccaacgataacgtctatttcggctacagcaccccctgggggtattttgacttcaacagattccattgccacttctcaccacgtgactggcagcgacttatcaacaacaactggggattccggcccaagaagctcaacttcaagctcttcaacatccaggtcaaggaggtcacgacgaatgacggtgtcacaaccatcgctaataaccttaccagcacggttcaggtcttttcggactcggaatatcaactgccgtacgtcctcggctccgcgcaccagggctgcctgcctccgttcccggcagacgtgttcatgattccgcagtacggatacctgactctgaacaatggcagccaatcggtaggccgttcctccttctactgcctggagtactttccttctcagatgctgagaacgggcaacaacttcacctttagctacaccttcgaggacgtgcctttccacagcagctacgcgcacagccagagtctggaccggctgatgaatcccctcatcgaccagtacctgtactacttggccagaacacagagcaacgcaggaggtactgctggcaatcgggaactgcagttttatcagggcggacctaccaccatggccgaacaagcaaagaactggctgcccggaccttgcttccggcaacagagagtatccaagacgctggatcaaaataacaacagcaactttgcctggactggtgccacaaaataccatttaaatggaagaaattcattggttaatcccggtgtcgccatggcaacccacaaggacgacgaggaacgcttcttcccttcgagcggagttctaatttttggcaaaactggagcagctaataaaactacattagaaaacgtgctcatgacaaatgaagaagaaattcgtcctaccaacccggtagctaccgaggaatacgggattgtaagcagcaacttgcaggcggctagcaccgcagcccagacacaagttgttaacaaccagggagccttacctggcatggtctggcagaaccgggacgtgtacctgcaaggtcccatttgggccaagattcctcacacggacggcaactttcacccgtctcctctaatgggtggctttggactgaaacacccgcctccccagatcctgatcaaaaacacaccggtacctgctaatcctccagaagtgtttactcctgccaagcttgcttccttcatcacgcagtacagcaccgggcaagtcagcgttgagatcgagtgggagctgcagaaagagaacagcaagcgctggaacccagagattcagtacacctccaactttgacaaacagactggagtggactttgctgttgacagccagggtgtttactctgagcct

SEQ ID NO: 29 - protein, 644 aa, Artificial Sequence
  Synthetic polypeptide
KAYDQQLKAGDNPYLRYNHADAEFQERLQEDTSFGGNLGRAVFQAKKRVLEPLGLVETPAKTAPGKKRPVDSPDSTSGIGKKGQQPAKKRLNFGQTGDSESVPDPQPIGEPPAGPSGLGSGTMAAGGGAPMADNSEGADGVGNASGNWHCDSTWLGDRVITTSTRTWALPTYNNHLYKQISSQSAGSTNDNVYFGYSTPWGYFDFNRFHCHFSPRDWQRLINNNWGFRPKKLNFKLFNIQVKEVTTNDGVTTIANNLTSTVQVFSDSEYQLPYVLGSAHQGCLPPFPADVFMIPQYGYLTLNNGSQSVGRSSFYCLEYFPSQMLRTGNNFTFSYTFEDVPFHSSYAHSQSLDRLMNPLIDQYLYYLARTQSNAGGTAGNRELQFYQGGPTTMAEQAKNWLPGPCFRQQRVSKTLDQNNNSNFAWTGATKYHLNGRNSLVNPGVAMATHKDDEERFFPSSGVLIFGKTGAANKTTLENVLMTNEEEIRPTNPVATEEYGIVSSNLQAASTAAQTQVVNNQGALPGMVWQNRDVYLQGPIWAKIPHTDGNFHPSPLMGGFGLKHPPPQILIKNTPVPANPPEVFTPAKLASFITQYSTGQVSVEIEWELQKENSKRWNPEIQYTSNFDKQTGVDFAVDSQGVYSEP

SEQ ID NO: 30 - DNA, 1933 bp, Artificial Sequence
  Synthetic polynucleotide
caaggcctacgaccagcagctcaaagcgggtgacaatccgtacctgcggtataaccacgccgacgccgagtttcaggagcgtcttcaagaagatacgtcttttgggggcaacctcgggcgagcagtcttccaggccaaaaagcgggttctcgaacctcttggtctggttgagacgccagctaagacggcacctggaaagaagcgaccggtagactcgccagactccacctcgggcatcggcaagaaaggccagcagcccgcgaaaaagagactcaactttgggcagactggcgactcagagtcagtccccgaccctcaaccaatcggagaaccaccagcaggcccctctggtctgggatctggtacaatggctgcaggcggtggcgcaccaatggctgacaataacgagggcgccgacggagtgggtaatgcctcaggaaattggcattgcgattccacatggctgggcgacagagtcatcaccaccagcacccgaacctgggccctgcccacctacaacaaccacctctacaagcaaatctccagtcagtcagcagggagcaccaacgataacgtctatttcggctacagcaccccctgggggtattttgacttcaacagattccattgccacttctcaccacgtgactggcagcgacttatcaacaacaactggggattccggcccaagaagctcaacttcaagctcttcaacatccaggtcaaggaggtcacgacgaatgacggcgtcacaaccatcgctaataaccttaccagcacggttcaggtcttttcggacccggaatatcaactgccgtacgtcctcggctccgcgcaccagggctgcctgcctccgttcccggcagacgtgttcatgattccgcagtacggatacctgactctgaacaatggcagccaatcggtaggccgttcctccttctactgcctggagtactttccttctcagatgctgagaacgggcaacaacttcacctttagctacaccttcgaggacgtgcctttccacagcagctacgcgcacagccagagtctggaccggctgatgaatcccctcatcgaccagtacctgtactacttggccagaacacagagcaacgcaggaggtactgctggcaatcgggaactgcagttttatcagggcggacctaccaccatggccgaacaagcaaagaactggctgcccggaccttgcttccggcaacagagagtatccaagacgctggatcaaaataacaacagcaactttgcctggactggtgccacaaaataccatttaaatggaagaaattcattggttaatcccggtgtcgccatggcaacccacaaggacgacgaggaacgcttcttcccttcgagcggagttctaatttttggcaaaactggagcagctaataaaactacattagaaaacgtgctcatgacaaatgaagaagaaattcgtcctaccaacccggtagctaccgaggaatacgggattgtaagcagcaacttgcaggcggctagcaccgcagcccagacacaagttgttaacaaccagggagccttacctggcatggtctggcagaaccgggacgtgtacctgcaaggtcccatttgggccaagattcctcacacggacggcaactttcacccgtctcctctaatgggtggctttggactgaaacacccgcctccccagatcctgatcaaaaacacaccggtacctgctaatcctccagaagtgtttactcctgccaagattgcttccttcatcacgcagtacagcaccgggcaagtcagcgttgagatcgagtgggagctgcagaaagagaacagcaagcgctggaacccagagattcagtacacctccaactttgacaaacagactggagtggactttgctgttgacagccagggtgtttactctgagcct

SEQ ID NO: 31 - protein, 644 aa, Artificial Sequence
  Synthetic polypeptide
KAYDQQLKAGDNPYLRYNHADAEFQERLQEDTSFGGNLGRAVFQAKKRVLEPLGLVETPAKTAPGKKRPVDSPDSTSGIGKKGQQPAKKRLNFGQTGDSESVPDPQPIGEPPAGPSGLGSGTMAAGGGAPMADNNEGADGVGNASGNWHCDSTWLGDRVITTSTRTWALPTYNNHLYKQISSQSAGSTNDNVYFGYSTPWGYFDFNRFHCHFSPRDWQRLINNNWGFRPKKLNFKLFNIQVKEVTTNDGVTTIANNLTSTVQVFSDPEYQLPYVLGSAHQGCLPPFPADVFMIPQYGYLTLNNGSQSVGRSSFYCLEYFPSQMLRTGNNFTFSYTFEDVPFHSSYAHSQSLDRLMNPLIDQYLYYLARTQSNAGGTAGNRELQFYQGGPTTMAEQAKNWLPGPCFRQQRVSKTLDQNNNSNFAWTGATKYHLNGRNSLVNPGVAMATHKDDEERFFPSSGVLIFGKTGAANKTTLENVLMTNEEEIRPTNPVATEEYGIVSSNLQAASTAAQTQVVNNQGALPGMVWQNRDVYLQGPIWAKIPHTDGNFHPSPLMGGFGLKHPPPQILIKNTPVPANPPEVFTPAKIASFITQYSTGQVSVEIEWELQKENSKRWNPEIQYTSNFDKQTGVDFAVDSQGVYSEP

SEQ ID NO: 32 - protein, 738 aa, Artificial Sequence
  Synthetic polypeptide
MAADGYLPDWLEDNLSEGIREWWALKPGAPKPKANQQKQDDGRGLVLPGYKYLGPFNGLDKGEPVNAADAAALEHDKAYDQQLKAGDNPYLRYNHADAEFQERLQEDTSFGGNLGRAVFQAKKRVLEPLGLVEEGAKTAPGKKRPVEPSPQRSPDSTTGIGKKGQQPAKKRLNFGQTGDSESVPDPQPIGEPPAGPSGLGSGTMAAGGGAPMADNNEGADGVGSSSGNWHCDSTWLGDRVITTSTRTWALPTYNNHLYKQISNGTSGGSTNDNTYFGYSTPWGYFDFNRFHCHFSPRDWQRLINNNWGFRPKRLNFKLFNIQVKEVTQNEGTKTIANNLTSTIQVFTDSEYQLPYVLGSARQGCLPPFPADVFMIPQYGYLTLNNGSQAVGRSSFYCLEYFPSQMLRTGNNFEFSYQFEDVPFHSSYAHSQSLDRLMNPLIDQYLYYLSRTQSTGGTAGTQQLLFSQAGPNNMSAQAKNWLPGPCYRQQRVSTTLSQNNNSNFAWTGATKYHLNGRDSLVNPGVAMATHKDDEERFFPSSGVLMFGKQGAGKGNVDYSSVMLTSEEEIKTTNPVATEQYGVVADNLQQQNAAPIVGAVNSQGALPGMVWQNRDVYLQGPIWAKIPHTDGNFHPSPLMGGFGLKHPPPQILIKNTPVPADPPTTFSQAKLASFITQYSTGQVSVEIEWELQKENSKRWNPEIQYTSNYYKSTNVDFAVNTDGTYSEPRPIGTRYLTRNL

SEQ ID NO: 33 - DNA, 3121 bp, Artificial Sequence
  Synthetic polynucleotide
gaattcgcccttctacggctgcgtcaactggaccaatgagaactttcccttcaacgactgtgtcgacaagatggtgatctggtgggaggaggggaagatgaccgccaaggtcgtggagtcggccaaagccattctcggaggaagcaaggtgcgcgtggaccagaaatgcaagtcctcggcccagatagacccgactcccgtgatcgtcacctccaacaccaacatgtgcgccgtgattgacgggaactcaacgaccttcgaacaccagcagccgttgcaagaccggatgttcaaatttgaactcacccgccgtctggatcatgactttgggaaggtcaccaagcaggaagtcaaagactttttccggtgggcaaaggatcacgtggttgaggtggagcacgaattctacgtcaaaaagggtggagccaagaaaagacccgcccccagtgacgcagatataagtgagcccaaacgggtgcgcgagtcagttgcgcagccatcgacgtcagacgcggaagcttcgatcaactacgcagacaggtaccaaaacaaatgttctcgtcacgcgggcatgaatctgatgctgtttccctgcagacaatgcgagagaatgaatcagaattcaaatatctgcttcactcacggacagaaagactgtttagagtgctttcccgtgtcagaatctcaacccgtttctgtcgtcaaaaaggcgtatcagaaactgtgctacattcatcatatcatgggaaaggtgccagacgcttgcactgcctgcgatctggtcgatgtggatttggatgactgcatctttgaacaataaatgatttaaatcaggtatggctgccgatggttatcttccagattggctcgaggacaacctctctgagggcattcgcgagtggtgggcgctgaaacctggagccccgaagcccaaagccaaccagcaaaagcaggacggcggccggggtctggtgcttcctggctacaagtacctcggacccttcaacggactcgacaagggggagcccgtcaacgcggcggacgcagcggccctcgagcacgacaaggcctacgaccagcagctcaaagcgggtgacaatccgtacctgcggtataaccacgccgacgccgagtttcaggagcgtctgcaagaagatacgtcttttgggggcaacctcgggcgagcagtcttccaggccaagaagcgggttctcgaacctctcggtctggttgaggaaggcgctaagacggctcctggaaagaagagaccggtagagccatcaccccagcgttctccagactcctctacgggcatcggcaagaaaggccagcagcccgcgaaaaagagactcaactttgggcagactggcgactcagagtcagtgcccgaccctcaaccaatcggagaaccccccgcaggcccctctggtctgggatctggtacaatggctgcaggcggtggcgctccaatggcagacaataacgaaggcgccgacggagtgggtagttcctcaggaaattggcattgcgattccacatggctgggcgactgagtcatcaccaccagcacccgaacctgggccctccccacctacaacaaccacctctacaagcaaatctccaacgggacttcgggaggaagcaccaacgacaacacctacttcggctacagcaccccctgggggtattttgactttaacagattccactgccacttctcaccacgtgactggcagcgactcatcaacaacaactggggattccggcccaagagactcaacttcaagctcttcaacatccaggtcaaggaggtcacgcagaatgaaggcaccaagaccatcgccaataaccttaccagcacgattcaggtctttacggactcggaataccagctcccgtacgtcctcggctctgcgcaccagggctgcctgcctccgttcccggcggacgtcttcatgattcctcagtacgggtacctgactctgaacaatggcagtcaggccgtgggccgttcctccttctactgcctggagtactttccttctcaaatgctgagaacgggcaacaactttgagttcagctaccagtttgaggacgtgccttttcacagcagctacgcgcacagccaaagcctggaccggctgatgaaccccctcatcgaccagtacctgtactacctgtctcggactcagtccacgggaggtaccgcaggaactcagcagttgctattttctcaggccgggcctaataacatgtcggctcaggccaaaaactggctacccgggccctgctaccggcagtaacgcgtctccacgacactgtcgcaaaataacaacagcaactttgtctggaccggtgccaccaagtatcatctgaatggcagagactctctggtagatcccggtgtcgctatggcaacccacaaggacgacgaagagcgattttttccgtccagcggagtcataatgtttgggaaacagggagctggaaaagacaacgtggactatagcagcgtcatgctaaccagtgaggaagaaattaaaaccaccaacccagtggccacagaacagtacggcgtggtggccgataacctgcaacagcaaaacgccgctcctattgtaggggccgtcaacagtcaaggagccttacctggcatggtctggcagaaccgggacgtgtacctgcagggtcctacctgggccaagattcctcacacggacggaaactttcatccctcgccgctgatgggaggctttggactgaaacacccgcctcctcagatcctgattaagaatacacctgttcccgcggatcctccaactaccttcagtcaagctaagctggcgtcgttcatcacgcagtacagcaccggacaggtcagcgtggaaattgaatgggagctgcaggaagaaaacagcaaacgctggaacccagagattcaatacacttccaactactacaaatctacaaatgtggactttgctgttaacacagatggcacttattctgagcctcgccccatcggcacccgttacctcacccgtaatctgtaattgcttgttaatcaataaaccggttgattcgtttcagttgaactttggtctctgcgaagggcgaattc

SEQ ID NO: 34 - protein, 738 aa, Artificial Sequence
  Synthetic polypeptide
MAADGYLPDWLEDNLSEGIREWWALKPGAPKPKANQQKQDDGRGLVLPGYKYLGPFNGLDKGEPVNAADAAALEHDKAYDQQLKAGDNPYLRYNHADAEFQERLQEDTSFGGNLGRAVFQAKKRVLEPLGLVEEGAKTAPGKKRPVEPSPQRSPDSSTGIGKKGQQPAKKRLNFGQTGDSESVPDPQPIGEPPAGPSGLGSGTMAAGGGAPMADNNEGADGVGSSSGNWHCDSTWLGDGVITTSTRTWALPTYNNHLYKQISNGTSGGSTNDNTYFGYSTPWGYFDFNRFHCHFSPRDWQRLINNNWGFRPKSLNFKLFNIQVKEVTQNEGTKTIANNLTSTIQVFTDSEYQLPYVLGSAHQGCLPPFPADVFMIPQYGYLTLNNGSQAVGRSSFYCLEYFPSQMLRTGNNFEFSYQFEDVPFHSSYAHSQSLDRLMNPLIDQYLYYLSRTQSTGGTAGTQQLLFSQAGPNNMSAQAKNWLPGPCYRQQRVSTTLSQNDNSNFAWTGATKYHLNGRDSLVNPGVAMATHKDDEERFFPSSGVLMFGKQGAGKDNVDYSSVMLTSEEEIKTTNPVATEQYGVVADNLQQQNAAPIVGAVNSQGALPGMVWQNRDVYLQGPIWAKIPHTDGNFHPSPLMGGFGLKHPPPQILIKNTPVPADPPTTFSQAKLASFITQYSTGQVSVEIEWELQKENSKRWNPEIQYTSNYYKSTNVDFAVNTDGTYSEPRPIGTRYLTRNL

SEQ ID NO: 35 - DNA, 3121 bp, Artificial Sequence
  Synthetic polynucleotide
gaattcgcccttcgcgagaccaaagttcaactgaaacgaatcaaccggtttattgattaacaagcaattacagattacgggtgaggtaacgggtgccgatggggcgaggctcagaataagtgccatctgtgttaacagcaaagtccacatttgtagatttgtagtagttggaagtgtattgaatctctgggttccagcgtttgctgttttctttctgcagctcccattcaatttccacgctgacctgtccggtgctgtactgcgtgatgaacgacgccagcttagcttgactgaaggtagttggaggatccgcgggaacaggtgtattcttaatcaggatctgaggaggcgggtgtttcagtccaaagcctcccatcagcggcgagggatgaaagtttccgtccgtgtgaggaatcttggcccagataggaccctgcaggtacacgtcccggttctgccagaccatgccaggtaaggctccttgactgttgacggcccctacaataggagcggcgttttgctgttgcaggttatcggccaccacgccgtactgttctgtggccactgggttggtggttttaatttcttcctcactggttagcataacgctgctatagtccacgttgtcttttccagctccctgtttcccaaacattaagactccgctggacggaaaaaatcgctcttcgtcgtccttgtgggttgccatagcgacaccgggatttaccagagagtctctgccattcagatgatacttggtggcaccggtccaggcaaagttgctgttgtcattttgcgacagtgtcgtggagacgcgttgctgccggtagcagggcccgggtagccagtttttggcctgagccgacatgttattaggcccggcctgagaaaatagcaactgctgagttcctgcggtacctcccgtggactgagtccgagacaggtagtacaggtactggtcgatgagggggttcatcagccggtccaggctttggctgtgcgcgtagctgctgtgaaaaggcacgtcctcaaactggtagctgaactcaaagttgttgcccgttctcagcatttgagaaggaaagtactccaggcagtagaaggaggaacggcccacggcctgactgccattgttcagagtcaggtacccgtactgaggaatcatgaagacgtccgccgggaacggaggcaggcagccctggtgcgcagagccgaggacgtacgggagctggtattccgagtccgtaaagacctgaatcgtgctggtaaggttattggcgatggtcttggtgccttcattctgcgtgacctccttgacctggatgttgaagagcttgaagttgaggctcttgggccggaatccccagttgttgttgatgagtcgctgccagtcacgtggtgagaagtggcagtggaatctgttaaagtcaaaatacccccagggggtgctgtagccgaagtaggtgttgtcgttggtgcttcctcccgaagtcccgttggagatttgcttgtagaggtggttgttgtaggtggggagggcccaggttcgggtgctggtggtgatgactccgtcgcccagccatgtggaatcgcaatgccaatttcctgaggaactacccactccgtcggcgccttcgttattgtctgccattggagcgccaccgcctgcagccattgtaccagatcccagaccagaggggcctgcggggggttctccgattggttgagggtcgggcactgactctgagtcgccagtctgcccaaagttgagtctctttttcgcgggctgctggcctttcttgccgatgcccgtagaggagtctggagaacgctggggtgatggctctaccggtctcttctttccaggagccgtcttagcgccttcctcaaccagaccgagaggttcgagaacccgcttcttggcctggaagactgctcgcccgaggttgcccccaaaagacgtatcttcttgcagacgctcctgaaactcggcgtcggcgtggttataccgcaggtacggattgtcacccgctttgagctgctggtcgtaggccttgtcgtgctcgagggccgctgcgtccgccgcgttgacgggctcccccttgtcgagtccgttgaagggtccgaggtacttgtagccaggaagcaccagaccccggccgtcgtcctgcttttgctggttggctttgggcttcggggctccaggtttcagcgcccaccactcgcgaatgccctcagagaggttgtcctcgagccaatctggaagataaccatcggcagccatacctgatttaaatcatttattgttcaaagatgcagtcatccaaatccacattgaccagatcgcaggcagtgcaagcgtctggcacctttcccatgatatgatgaatgtagcacagtttctgatacgcctttttgacgacagaaacgggttgagattctgacacgggaaagcactctaaacagtctttctgtccgtgagtgaagcagatatttgaattctgattcattctctcgcattgtctgcagggaaacagcatcagattcatgcccacgtgacgagaacatttgttttggtacctgtctgcgtagttgatcgaagcttccgcgtctgacgtcgatggctgcgcaactgactcgcgcacccgtttgggctcacttatatctgcgtcactgggggcgggtcttttcttggctccaccctttttgacgtagaattcatgctccacctcaaccacgtgatcctttgcccaccggaaaaagtctttgacttcctgcttggtgaccttcccaaagtcatgatccagacggcgggtgagttcaaatttgaacatccggtcttgcaacggctgctggtgttcgaaggtcgttgagttcccgtcaatcacggcgcacatgttggtgttggaggtgacgatcacgggagtcgggtctatctgggccgaggacttgcatttctggtccacgcgcaccttgcttcctccgagaatggctttggccgactccacgaccttggcggtcatcttcccctcctcccaccagatcaccatcttgtcgacacagtcgttgaagggaaagttctcattggtccagttgacgcagccgtagaaagggcgaattc

SEQ ID NO: 36 - DNA, 2211 bp, Artificial Sequence
  Synthetic polynucleotide
atggctgctgacggttatcttccagattggctcgaggacaacctttctgaaggcattcgtgagtggtgggctctgaaacctggagtccctcaacccaaagcgaaccaacaacaccaggacaaccgtcggggtcttgtgcttccgggttacaaatacctcggacccggtaacggactcgacaaaggagagccggtcaacgaggcggacgcggcagccctcgaacacgacaaagcttacgaccagcagctcaaggccggtgacaacccgtacctcaagtacaaccacgccgacgccgagtttcaggagcgtcttcaagaagatacgtcttttgggggcaaccttggcagagcagtcttccaggccaaaaagaggatccttgagcctcttggtctggttgaggaagcagctaaaacggctcctggaaagaagggggctgtagatcagtctcctcaggaaccggactcatcatctggtgttggcaaatcgggcaaacagcctgccagaaaaagactaaatttcggtcagactggagactcagagtcagtcccagaccctcaacctctcggagaaccaccagcagcccccacaagtttgggatctaatacaatggcttcaggcggtggcgcaccaatggcagacaataacgagggtgccgatggagtgggtaattcctcaggaaattggcattgcgattcccaatggctgggcgacagagtcatcaccaccagcaccagaacctgggccctgcccacttacaacaaccatctctacaagcaaatctccagccaatcaggagcttcaaacgacaaccactactttggctacagcaccccttgggggtattttgactttaacagattccactgccacttctcaccacgtgactggcagcgactcattaacaacaactggggattccggcccaagaaactcagcttcaagctcttcaacatccaagttagaggggtcacgcagaacgatggcacgacgactattgccaataaccttaccagcacggttcaagtgtttacggactcggagtatcagctcccgtacgtgctcgggtcggcgcaccaaggctgtctcccgccgtttccagcggacgtcttcatggtccctcagtatggatacctcaccctgaacaacggaagtcaagcggtgggacgctcatccttttactgcctggagtacttcccttcgcagatgctaaggactggaaataacttccaattcagctataccttcgaggatgtaccttttcacagcagctacgctcacagccagagtttggatcgcttgatgaatcctcttattgatcagtatctgtactacctgaacagaacgcaaggaacaacctctggaacaaccaaccaatcacggctgctttttagccaggctgggcctcagtctatgtctttgcaggccagaaattggctacctgggccctgctaccggcaacagagactttcaaagactgctaacgacaacaacaacagtaactttccttggacagcggccagcaaatatcatctcaatggccgcgactcgctggtgaatccaggaccagctatggccagtcacaaggacgatgaagaaaaatttttccctatgcacggcaatctaatatttggcaaagaagggacaacggcaagtaacgcagaattagataatgtaatgattacggatgaagaagagattcgtaccaccaatcctgtggcaacagagcagtatggaactgtggcaaataacttgcagagctcaaatacagctcccacgactggaactgtcaatcatcagggggccttacctggcatggtgtggcaagatcgtgacgtgtaccttcaaggacctatctgggcaaagattcctcacacggatggacactttcatccttctcctctgatgggaggctttggactgaaacatccgcctcctcaaatcatgatcaaaaatactccggtaccggcaaatcctccgacgactttcagcccggccaagtttgcttcatttatcactcagtactccactggacaggtcagcgtggaaattgagtgggagctacagaaagaaaacagcaaacgttggaatccagagattcagtacacttccaactacaacaagtctgttaatgtggactttactgtagacactaatggtgtttatagtgaacctcgccctattggaacccggtatctcacacgaaacttgtga

SEQ ID NO: 37 - protein, 736 aa, Adeno-associated virus 3
MAADGYLPDWLEDNLSEGIREWWALKPGVPQPKANQQHQDNRRGLVLPGYKYLGPGNGLDKGEPVNEADAAALEHDKAYDQQLKAGDNPYLKYNHADAEFQERLQEDTSFGGNLGRAVFQAKKRILEPLGLVEEAAKTAPGKKGAVDQSPQEPDSSSGVGKSGKQPARKRLNFGQTGDSESVPDPQPLGEPPAAPTSLGSNTMASGGGAPMADNNEGADGVGNSSGNWHCDSQWLGDRVITTSTRTWALPTYNNHLYKQISSQSGASNDNHYFGYSTPWGYFDFNRFHCHFSPRDWQRLINNNWGFRPKKLSFKLFNIQVRGVTQNDGTTTIANNLTSTVQVFTDSEYQLPYVLGSAHQGCLPPFPADVFMVPQYGYLTLNNGSQAVGRSSFYCLEYFPSQMLRTGNNFQFSYTFEDVPFHSSYAHSQSLDRLMNPLIDQYLYYLNRTQGTTSGTTNQSRLLFSQAGPQSMSLQARNWLPGPCYRQQRLSKTANDNNNSNFPWTAASKYHLNGRDSLVNPGPAMASHKDDEEKFFPMHGNLIFGKEGTTASNAELDNVMITDEEEIRTTNPVATEQYGTVANNLQSSNTAPTTGTVNHQGALPGMVWQDRDVYLQGPIWAKIPHTDGHFHPSPLMGGFGLKHPPPQIMIKNTPVPANPPTTFSPAKFASFITQYSTGQVSVEIEWELQKENSKRWNPEIQYTSNYNKSVNVDFTVDTNGVYSEPRPIGTRYLTRNL

SEQ ID NO: 38 - DNA, 4726 bp, Adeno-associated virus serotype 3
ttggccactccctctatgcgcactcgctcgctcggtggggcctggcgaccaaaggtcgccagacggacgtgctttgcacgtccggccccaccgagcgagcgagtgcgcatagagggagtggccaactccatcactagaggtatggcagtgacgtaacgcgaagcgcgcgaagcgagaccacgcctaccagctgcgtcagcagtcaggtgacccttttgcgacagtttgcgacaccacgtggccgctgagggtatatattctcgagtgagcgaaccaggagctccattttgaccgcgaaatttgaacgagcagcagccatgccggggttctacgagattgtcctgaaggtcccgagtgacctggacgagcgcctgccgggcatttctaactcgtttgttaactgggtggccgagaaggaatgggacgtgccgccggattctgacatggatccgaatctgattgagcaggcacccctgaccgtggccgaaaagcttcagcgcgagttcctggtggagtggcgccgcgtgagtaaggccccggaggccctcttttttgtccagttcgaaaagggggagacctacttccacctgcacgtgctgattgagaccatcggggtcaaatccatggtggtcggccgctacgtgagccagattaaagagaagctggtgacccgcatctaccgcggggtcgagccgcagcttccgaactggttcgcggtgaccaaaacgcgaaatggcgccgggggcgggaacaaggtggtggacgactgctacatccccaactacctgctccccaagacccagcccgagctccagtgggcgtggactaacatggaccagtatttaagcgcctgtttgaatctcgcggagcgtaaacggctggtggcgcagcatctgacgcacgtgtcgcagacgcaggagcagaacaaagagaatcagaaccccaattctgacgcgccggtcatcaggtcaaaaacctcagccaggtacatggagctggtcgggtggctggtggaccgcgggatcacgtcagaaaagcaatggattcaggaggaccaggcctcgtacatctccttcaacgccgcctccaactcgcggtcccagatcaaggccgcgctggacaatgcctccaagatcatgagcctgacaaagacggctccggactacctggtgggcagcaacccgccggaggacattaccaaaaatcggatctaccaaatcctggagctgaacgggtacgatccgcagtacgcggcctccgtcttcctgggctgggcgcaaaagaagttcgggaagaggaacaccatctggctctttgggccggccacgacgggtaaaaccaacatcgcggaagccatcgcccacgccgtgcccttctacggctgcgtaaactggaccaatgagaactttcccttcaacgattgcgtcgacaagatggtgatctggtgggaggagggcaagatgacggccaaggtcgtggagagcgccaaggccattctgggcggaagcaaggtgcgcgtggaccaaaagtgcaagtcatcggcccagatcgaacccactcccgtgatcgtcacctccaacaccaacatgtgcgccgtgattgacgggaacagcaccaccttcgagcatcagcagccgctgcaggaccggatgtttgaatttgaacttacccgccgtttggaccatgactttgggaaggtcaccaaacaggaagtaaaggactttttccggtgggcttccgatcacgtgactgacgtggctcatgagttctacgtcagaaagggtggagctaagaaacgccccgcctccaatgacgcggatgtaagcgagccaaaacgggagtgcacgtcacttgcgcagccgacaacgtcagacgcggaagcaccggcggactacgcggacaggtaccaaaacaaatgttctcgtcacgtgggcatgaatctgatgctttttccctgtaaaacatgcgagagaatgaatcaaatttccaatgtctgttttacgcatggtcaaagagactgtggggaatgcttccctggaatgtcagaatctcaacccgtttctgtcgtcaaaaagaagacttatcagaaactgtgtccaattcatcatatcctgggaagggcacccgagattgcctgttcggcctgcgatttggccaatgtggacttggatgactgtgtttctgagcaataaatgacttaaaccaggtatggctgctgacggttatcttccagattggctcgaggacaacctttctgaaggcattcgtgagtggtgggctctgaaacctggagtccctcaacccaaagcgaaccaacaacaccaggacaaccgtcggggtcttgtgcttccgggttacaaatacctcggacccggtaacggactcgacaaaggagagccggtcaacgaggcggacgcggcagccctcgaacacgacaaagcttacgaccagcagctcaaggccggtgacaacccgtacctcaagtacaaccacgccgacgccgagtttcaggagcgtcttcaagaagatacgtcttttgggggcaaccttggcagagcagtcttccaggccaaaaagaggatccttgagcctcttggtctggttgaggaagcagctaaaacggctcctggaaagaagggggctgtagatcagtctcctcaggaaccggactcatcatctggtgttggcaaatcgggcaaacagcctgccagaaaaagactaaatttcggtcagactggagactcagagtcagtcccagaccctcaacctctcggagaaccaccagcagcccccacaagtttgggatctaatacaatggcttcaggcggtggcgcaccaatggcagacaataacgagggtgccgatggagtgggtaattcctcaggaaattggcattgcgattcccaatggctgggcgacagagtcatcaccaccagcaccagaacctgggccctgcccacttacaacaaccatctctacaagcaaatctccagccaatcaggagcttcaaacgacaaccactactttggctacagcaccccttgggggtattttgactttaacagattccactgccacttctcaccacgtgactggcagcgactcattaacaacaactggggattccggcccaagaaactcagcttcaagctcttcaacatccaagttagaggggtcacgcagaacgatggcacgacgactattgccaataaccttaccagcacggttcaagtgtttacggactcggagtatcagctcccgtacgtgctcgggtcggcgcaccaaggctgtctcccgccgtttccagcggacgtcttcatggtccctcagtatggatacctcaccctgaacaacggaagtcaagcggtgggacgctcatccttttactgcctggagtacttcccttcgcagatgctaaggactggaaataacttccaattcagctataccttcgaggatgtaccttttcacagcagctacgctcacagccagagtttggatcgcttgatgaatcctcttattgatcagtatctgtactacctgaacagaacgcaaggaacaacctctggaacaaccaaccaatcacggctgctttttagccaggctgggcctcagtctatgtctttgcaggccagaaattggctacctgggccctgctaccggcaacagagactttcaaagactgctaacgacaacaacaacagtaactttccttggacagcggccagcaaatatcatctcaatggccgcgactcgctggtgaatccaggaccagctatggccagtcacaaggacgatgaagaaaaatttttccctatgcacggcaatctaatatttggcaaagaagggacaacggcaagtaacgcagaattagataatgtaatgattacggatgaagaagagattcgtaccaccaatcctgtggcaacagagcagtatggaactgtggcaaataacttgcagagctcaaatacagctcccacgactggaactgtcaatcatcagggggccttacctggcatggtgtggcaagatcgtgacgtgtaccttcaaggacctatctgggcaaagattcctcacacggatggacactttcatccttctcctctgatgggaggctttggactgaaacatccgcctcctcaaatcatgatcaaaaatactccggtaccggcaaatcctccgacgactttcagcccggccaagtttgcttcatttatcactcagtactccactggacaggtcagcgtggaaattgagtgggagctacagaaagaaaacagcaaacgttggaatccagagattcagtacacttccaactacaacaagtctgttaatgtggactttactgtagacactaatggtgtttatagtgaacctcgccctattggaacccggtatctcacacgaaacttgtgaatcctggttaatcaataaaccgtttaattcgtttcagttgaactttggctcttgtgcacttctttatctttatcttgtttccatggctactgcgtagataagcagcggcctgcggcgcttgcgcttcgcggtttacaactgctggttaatatttaactctcgccatacctctagtgatggagttggccactccctctatgcgcactcgctcgctcggtggggcctggcgaccaaaggtcgccagacggacgtgctttgcacgtccggccccaccgagcgagcgagtgcgcatagagggagtggccaa

SEQ ID NO: 39 - protein, 737 aa, Artificial Sequence
  Synthetic polypeptide
MAADGYLPDWLEDNLSEGIREWWDLKPGAPKPKANQQKQDNGRGLVLPGYKYLGPFNGLDKGEPVNAADAAALEHDKAYDQQLNAGDNPYLRYNHADAEFQERLQEDTSFGGNLGRAVFQAKKRVLEPLGLVEEGAKTAPAKKRPVEPSPQRSPDSSTGIGKKGQQPARKRLNFGQTGDSESVPDPQPLGEPPAAPSSVGSGTVAAGGGAPMADNNEGADGVGNASGNWHCDSTWLGDRVITTSTRTWALPTYNNHLYEQISSETAGSTNDNTYFGYSTPWGYFDFNRFHCHFSPRDWQRLINNNWGFRPKKLRFKLFNIQVKEVTTNDGVTTIANNLTSTIQVFSDSEYQLPYVLGSAHQGCLPPFPADVFMIPQYGYLTLNNGSQSVGRSSFYCLEYFPSQMLRTGNNFEFSYSFEDVPFHSSYAHSQSLDRLMNPLIDQYLYYLARTQSDPGGTAGNRELQFYQGGPSTMAEQAKNWLPGPCFRQQRVSKTLDQNNNSNFAWTGATKYHLNGRNSLVNPGVAMATHKDDEDRFFPSSGVLIFGKTGATNKTTLENVLMTNEEEIRPTNPVATEEYGIVSSNLQAANTAAQTQVVNNQGALPGMVWQNRDVYLQGPIWAKIPHTDGNFHPSPLMGGFGLKHPPPQILIKNTPVPANPPEVFTPAKFASFITQYSTGQVSVEIEWELQKENSKRWDPEIQYTSNFEKQTGVDFAVDSQGVYSEPRPIGTRYLTRNL

SEQ ID NO: 40 - DNA, 2211 bp, Artificial Sequence
  Synthetic polynucleotide
atggctgctgacggttatcttccagattggctcgaggacaacctttctgaaggcattcgtgagtggtgggctctgaaacctggagtccctcaacccaaagcgaaccaacaacaccaggacaaccgtcggggtcttgtgcttccgggttacaaatacctcggacccggtaacggactcgacaaaggagagccggtcaacgaggcggacgcggcagccctcgaacacgacaaagcttacgaccagcagctcaaggccggtgacaacccgtacctcaagtacaaccacgccgacgccgagtttcaggagcgtcttcaagaagatacgtcttttgggggcaaccttggcagagcagtcttccaggccaaaaagaggatccttgagcctcttggtctggttgaggaagcagctaaaacggctcctggaaagaagggggctgtagatcagtctcctcaggaaccggactcatcatctggtgttggcaaatcgggcaaacagcctgccagaaaaagactaaatttcggtcagactggagactcagagtcagtcccagaccctcaacctctcggagaaccaccagcagcccccacaagtttgggatctaatacaatggcttcaggcggtggcgcaccaatggcagacaataacgagggtgccgatggagtgggtaattcctcaggaaattggcattgcgattcccaatggctgggcgacagagtcatcaccaccagcaccagaacctgggccctgcccacttacaacaaccatctctacaagcaaatctccagccaatcaggagcttcaaacgacaaccactactttggctacagcaccccttgggggtattttgactttaacagattccactgccacttctcaccacgtgactggcagcgactcattaacaacaactggggattccggcccaagaaactcagcttcaagctcttcaacatccaagttagaggggtcacgcagaacgatggcacgacgactattgccaataaccttaccagcacggttcaagtgtttacggactcggagtatcagctcccgtacgtgctcgggtcggcgcaccaaggctgtctcccgccgtttccagcggacgtcttcatggtccctcagtatggatacctcaccctgaacaacggaagtcaagcggtgggacgctcatccttttactgcctggagtacttcccttcgcagatgctaaggactggaaataacttccaattcagctataccttcgaggatgtaccttttcacagcagctacgctcacagccagagtttggatcgcttgatgaatcctcttattgatcagtatctgtactacctgaacagaacgcaaggaacaacctctggaacaaccaaccaatcacggctgctttttagccaggctgggcctcagtctatgtctttgcaggccagaaattggctacctgggccctgctaccggcaacagagactttcaaagactgctaacgacaacaacaacagtaactttccttggacagcggccagcaaatatcatctcaatggccgcgactcgctggtgaatccaggaccagctatggccagtcacaaggacgatgaagaaaaatttttccctatgcacggcaatctaatatttggcaaagaagggacaacggcaagtaacgcagaattagataatgtaatgattacggatgaagaagagattcgtaccaccaatcctgtggcaacagagcagtatggaactgtggcaaataacttgcagagctcaaatacagctcccacgactggaactgtcaatcatcagggggccttacctggcatggtgtggcaagatcgtgacgtgtaccttcaaggacctatctgggcaaagattcctcacacggatggacactttcatccttctcctctgatgggaggctttggactgaaacatccgcctcctcaaatcatgatcaaaaatactccggtaccggcaaatcctccgacgactttcagcccggccaagtttgcttcatttatcactcagtactccactggacaggtcagcgtggaaattgagtgggagctacagaaagaaaacagcaaacgttggaatccagagattcagtacacttccaactacaacaagtctgttaatgtggactttactgtagacactaatggtgtttatagtgaacctcgccctattggaacccggtatctcacacgaaacttgtaa

SEQ ID NO: 41 - protein, 736 aa, Artificial Sequence; identical to SEQ ID NO: 37
  Synthetic polypeptide

SEQ ID NO: 42 - protein, 736 aa, Adeno-associated virus 3A; identical to SEQ ID NO: 37

SEQ ID NO: 43 - protein, 624 aa, Adeno-associated virus 3A
MPGFYEIVLKVPSDLDERLPGISNSFVNWVAEKEWDVPPDSDMDPNLIEQAPLTVAEKLQREFLVEWRRVSKAPEALFFVQFEKGETYFHLHVLIETIGVKSMVVGRYVSQIKEKLVTRIYRGVEPQLPNWFAVTKTRNGAGGGNKVVDDCYIPNYLLPKTQPELQWAWTNMDQYLSACLNLAERKRLVAQHLTHVSQTQEQNKENQNPNSDAPVIRSKTSARYMELVGWLVDRGITSEKQWIQEDQASYISFNAASNSRSQIKAALDNASKIMSLTKTAPDYLVGSNPPEDITKNRIYQILELNGYDPQYAASVFLGWAQKKFGKRNTIWLFGPATTGKTNIAEAIAHAVPFYGCVNWTNENFPFNDCVDKMVIWWEEGKMTAKVVESAKAILGGSKVRVDQKCKSSAQIEPTPVIVTSNTNMCAVIDGNSTTFEHQQPLQDRMFEFELTRRLDHDFGKVTKQEVKDFFRWASDHVTDVAHEFYVRKGGAKKRPASNDADVSEPKRECTSLAQPTTSDAEAPADYADRYQNKCSRHVGMNLMLFPCKTCERMNQISNVCFTHGQRDCGECFPGMSESQPVSVVKKKTYQKLCPIHHILGRAPEIACSACDLANVDLDDCVSEQ

SEQ ID NO: 44 - protein, 736 aa, Adeno-associated virus 3B
MAADGYLPDWLEDNLSEGIREWWALKPGVPQPKANQQHQDNRRGLVLPGYKYLGPGNGLDKGEPVNEADAAALEHDKAYDQQLKAGDNPYLKYNHADAEFQERLQEDTSFGGNLGRAVFQAKKRILEPLGLVEEAAKTAPGKKRPVDQSPQEPDSSSGVGKSGKQPARKRLNFGQTGDSESVPDPQPLGEPPAAPTSLGSNTMASGGGAPMADNNEGADGVGNSSGNWHCDSQWLGDRVITTSTRTWALPTYNNHLYKQISSQSGASNDNHYFGYSTPWGYFDFNRFHCHFSPRDWQRLINNNWGFRPKKLSFKLFNIQVKEVTQNDGTTTIANNLTSTVQVFTDSEYQLPYVLGSAHQGCLPPFPADVFMVPQYGYLTLNNGSQAVGRSSFYCLEYFPSQMLRTGNNFQFSYTFEDVPFHSSYAHSQSLDRLMNPLIDQYLYYLNRTQGTTSGTTNQSRLLFSQAGPQSMSLQARNWLPGPCYRQQRLSKTANDNNNSNFPWTAASKYHLNGRDSLVNPGPAMASHKDDEEKFFPMHGNLIFGKEGTTASNAELDNVMITDEEEIRTTNPVATEQYGTVANNLQSSNTAPTTRTVNDQGALPGMVWQDRDVYLQGPIWAKIPHTDGHFHPSPLMGGFGLKHPPPQIMIKNTPVPANPPTTFSPAKFASFITQYSTGQVSVEIEWELQKENSKRWNPEIQYTSNYNKSVNVDFTVDTNGVYSEPRPIGTRYLTRNL

SEQ ID NO: 45 - protein, 624 aa, Adeno-associated virus 3B
MPGFYEIVLKVPSDLDEHLPGISNSFVNWVAEKEWELPPDSDMDPNLIEQAPLTVAEKLQREFLVEWRRVSKAPEALFFVQFEKGETYFHLHVLIETIGVKSMVVGRYVSQIKEKLVTRIYRGVEPQLPNWFAVTKTRNGAGGGNKVVDDCYIPNYLLPKTQPELQWAWTNMDQYLSACLNLAERKRLVAQHLTHVSQTQEQNKENQNPNSDAPVIRSKTSARYMELVGWLVDRGITSEKQWIQEDQASYISFNAASNSRSQIKAALDNASKIMSLTKTAPDYLVGSNPPEDITKNRIYQILELNGYDPQYAASVFLGWAQKKFGKRNTIWLFGPATTGKTNIAEAIAHAVPFYGCVNWTNENFPFNDCVDKMVIWWEEGKMTAKVVESAKAILGGSKVRVDQKCKSSAQIEPTPVIVTSNTNMCAVIDGNSTTFEHQQPLQDRMFKFELTRRLDHDFGKVTKQEVKDFFRWASDHVTDVAHEFYVRKGGAKKRPASNDADVSEPKRQCTSLAQPTTSDAEAPADYADRYQNKCSRHVGMNLMLFPCKTCERMNQISNVCFTHGQRDCGECFPGMSESQPVSVVKKKTYQKLCPIHHILGRAPEIACSACDLANVDLDDCVSEQ

SEQ ID NO: 46 - DNA, 4722 bp, Adeno-associated virus 3B
tggccactccctctatgcgcactcgctcgctcggtggggcctggcgaccaaaggtcgccagacggacgtgctttgcacgtccggccccaccgagcgagcgagtgcgcatagagggagtggccaactccatcactagaggtatggcagtgacgtaacgcgaagcgcgcgaagcgagaccacgcctaccagctgcgtcagcagtcaggtgacccttttgcgacagtttgcgacaccacgtggccgctgagggtatatattctcgagtgagcgaaccaggagctccattttgaccgcgaaatttgaacgagcagcagccatgccggggttctacgagattgtcctgaaggtcccgagtgacctggacgagcacctgccgggcatttctaactcgtttgttaactgggtggccgagaaggaatgggagctgccgccggattctgacatggatccgaatctgattgagcaggcacccctgaccgtggccgaaaagcttcagcgcgagttcctggtggagtggcgccgcgtgagtaaggccccggaggccctcttttttgtccagttcgaaaagggggagacctacttccacctgcacgtgctgattgagaccatcggggtcaaatccatggtggtcggccgctacgtgagccagattaaagagaagctggtgacccgcatctaccgcggggtcgagccgcagcttccgaactggttcgcggtgaccaaaacgcgaaatggcgccgggggcgggaacaaggtggtggacgactgctacatccccaactacctgctccccaagacccagcccgagctccagtgggcgtggactaacatggaccagtatttaagcgcctgtttgaatctcgcggagcgtaaacggctggtggcgcagcatctgacgcacgtgtcgcagacgcaggagcagaacaaagagaatcagaaccccaattctgacgcgccggtcatcaggtcaaaaacctcagccaggtacatggagctggtcgggtggctggtggaccgcgggatcacgtcagaaaagcaatggattcaggaggaccaggcctcgtacatctccttcaacgccgcctccaactcgcggtcccagatcaaggccgcgctggacaatgcctccaagatcatgagcctgacaaagacggctccggactacctggtgggcagcaacccgccggaggacattaccaaaaatcggatctaccaaatcctggagctgaacgggtacgatccgcagtacgcggcctccgtcttcctgggctgggcgcaaaagaagttcgggaagaggaacaccatctggctctttgggccggccacgacgggtaaaaccaacatcgcggaagccatcgcccacgccgtgcccttctacggctgcgtaaactggaccaatgagaactttcccttcaacgattgcgtcgacaagatggtgatctggtgggaggagggcaagatgacggccaaggtcgtggagagcgccaaggccattctgggcggaagcaaggtgcgcgtggaccaaaagtgcaagtcatcggcccagatcgaacccactcccgtgatcgtcacctccaacaccaacatgtgcgccgtgattgacgggaacagcaccaccttcgagcatcagcagccgctgcaggaccggatgtttaaatttgaacttacccgccgtttggaccatgactttgggaaggtcaccaaacaggaagtaaaggactttttccggtgggcttccgatcacgtgactgacgtggctcatgagttctacgtcagaaagggtggagctaagaaacgccccgcctccaatgacgcggatgtaagcgagccaaaacggcagtgcacgtcacttgcgcagccgacaacgtcagacgcggaagcaccggcggactacgcggacaggtaccaaaacaaatgttctcgtcacgtgggcatgaatctgatgctttttccctgtaaaacatgcgagagaatgaatcaaatttccaatgtctgttttacgcatggtcaaagagactgtggggaatgcttccctggaatgtcagaatctcaacccgtttctgtcgtcaaaaagaagacttatcagaaactgtgtccaattcatcatatcctgggaagggcacccgagattgcctgttcggcctgcgatttggccaatgtggacttggatgactgtgtttctgagcaataaatgacttaaaccaggtatggctgctgacggttatcttccagattggctcgaggacaacctttctgaaggcattcgtgagtggtgggctctgaaacctggagtccctcaacccaaagcgaaccaacaacaccaggacaaccgtcggggtcttgtgcttccgggttacaaatacctcggacccggtaacggactcgacaaaggagagccggtcaacgaggcggacgcggcagccctcgaacacgacaaagcttacgaccagcagctcaaggccggtgacaacccgtacctcaagtacaaccacgccgacgccgagtttcaggagcgtcttcaagaagatacgtcttttgggggcaaccttggcagagcagtcttccaggccaaaaagaggatccttgagcctcttggtctggttgaggaagcagctaaaacggctcctggaaagaagaggcctgtagatcagtctcctcaggaaccggactcatcatctggtgttggcaaatcgggcaaacagcctgccagaaaaagactaaatttcggtcagactggcgactcagagtcagtcccagaccctcaacctctcggagaaccaccagcagcccccacaagtttgggatctaatacaatggcttcaggcggtggcgcaccaatggcagacaataacgagggtgccgatggagtgggtaattcctcaggaaattggcattgcgattcccaatggctgggcgacagagtcatcaccaccagcaccagaacctgggccctgcccacttacaacaaccatctctacaagcaaatctccagccaatcaggagcttcaaacgacaaccactactttggctacagcaccccttgggggtattttgactttaacagattccactgccacttctcaccacgtgactggcagcgactcattaacaacaactggggattccggcccaagaaactcagcttcaagctcttcaacatccaagttaaagaggtcacgcagaacgatggcacgacgactattgccaataaccttaccagcacggttcaagtgtttacggactcggagtatcagctcccgtacgtgctcgggtcggcgcaccaaggctgtctcccgccgtttccagcggacgtcttcatggtccctcagtatggatacctcaccctgaacaacggaagtcaagcggtgggacgctcatccttttactgcctggagtacttcccttcgcagatgctaaggactggaaataacttccaattcagctataccttcgaggatgtaccttttcacagcagctacgctcacagccagagtttggatcgcttgatgaatcctcttattgatcagtatctgtactacctgaacagaacgcaaggaacaacctctggaacaaccaaccaatcacggctgctttttagccaggctgggcctcagtctatgtctttgcaggccagaaattggctacctgggccctgctaccggcaacagagactttcaaagactgctaacgacaacaacaacagtaactttccttggacagcggccagcaaatatcatctcaatggccgcgactcgctggtgaatccaggaccagctatggccagtcacaaggacgatgaagaaaaatttttccctatgcacggcaatctaatatttggcaaagaagggacaacggcaagtaacgcagaattagataatgtaatgattacggatgaagaagagattcgtaccaccaatcctgtggcaacagagcagtatggaactgtggcaaataacttgcagagctcaaatacagctcccacgactagaactgtcaatgatcagggggccttacctggcatggtgtggcaagatcgtgacgtgtaccttcaaggacctatctgggcaaagattcctcacacggatggacactttcatccttctcctctgatgggaggctttggactgaaacatccgcctcctcaaatcatgatcaaaaatactccggtaccggcaaatcctccgacgactttcagcccggccaagtttgcttcatttatcactcagtactccactggacaggtcagcgtggaaattgagtgggagctacagaaagaaaacagcaaacgttggaatccagagattcagtacacttccaactacaacaagtctgttaatgtggactttactgtagacactaatggtgtttatagtgaacctcgccctattggaacccggtatctcacacgaaacttgtaatcctggttaatcaataaaccgtttaattcgtttcagttgaactttggctcttgtgcacttcttatcttatcttgtttccatggctactgcgtagataagcagcggcctgcggcgcttgcgcttcgcggtttacaactgctggttaatatttaactctcgccatacctctagtgatggagttggccactccctctatgcgcactcgctcgctcggtggggccggacgtgcaaagcacgtccgtctggcgacctttggtcgccaggccccaccgagcgagcgagtgcgcatagagggagtggccaa

SEQ ID NO: 47 - DNA, 1800 bp, Adeno-associated virus 4
  modified_base (342)..(342): a, c, t, or g
  misc_feature (342)..(342): n is a, c, g, or t
acggctcctggaaagaagagaccgttgattgaatccccccagcagcccgactcctccacgggtatcggcaaaaaaggcaagcagccggctaaaaagaagctcgttttcgaagacgaaactggagcaggcgacggaccccctgagggatcaacttccggagccatgtctgatgacagtgagatgcgtgcagcagctggcggagctgcagtcgagggsggacaaggtgccgatggagtgggtaatgcctcgggtgattggcattgcgattccacctggtctgagggccacgtcacgaccaccagcaccagaacctgggtcttgcccacctacaacaaccacctntacaagcgactcggagagagcctgcagtccaacacctacaacggattctccaccccctggggatactttgacttcaaccgcttccactgccacttctcaccacgtgactggcagcgactcatcaacaacaactggggcatgcgacccaaagccatgcgggtcaaaatcttcaacatccaggtcaaggaggtcacgacgtcgaacggcgagacaacggtggctaataaccttaccagcacggttcagatctttgcggactcgtcgtacgaactgccgtacgtgatggatgcgggtcaagagggcagcctgcctccttttcccaacgacgtctttatggtgccccagtacggctactgtggactggtgaccggcaacacttcgcagcaacagactgacagaaatgccttctactgcctggagtactttccttcgcagatgctgcggactggcaacaactttgaaattacgtacagttttgagaaggtgcctttccactcgatgtacgcgcacagccagagcctggaccggctgatgaaccctctcatcgaccagtacctgtggggactgcaatcgaccaccaccggaaccaccctgaatgccgggactgccaccaccaactttaccaagctgcggcctaccaacttttccaactttaaaaagaactggctgcccgggccttcaatcaagcagcagggcttctcaaagactgccaatcaaaactacaagatccctgccaccgggtcagacagtctcatcaaatacgagacgcacagcactctggacggaagatggagtgccctgacccccggacctccaatggccacggctggacctgcggacagcaagttcagcaacagccagctcatctttgcggggcctaaacagaacggcaacacggccaccgtacccgggactctgatcttcacctctgaggaggagctggcagccaccaacgccaccgatacggacatgtggggcaacctacctggcggtgaccagagcaacagcaacctgccgaccgtggacagactgacagccttgggagccgtgcctggaatggtctggcaaaacagagacatttactaccagggtcccatttgggccaagattcctcataccgatggacactttcacccctcaccgctgattggtgggtttgggctgaaacacccgcctcctcaaatttttatcaagaacaccccggtacctgcgaatcctgcaacgaccttcagctctactccggtaaactccttcattactcagtacagcactggccaggtgtcggtgcagattgactgggagatccagaaggagcggtccaaacgctggaaccccgaggtccagtttacctccaactacggacagcaaaactctctgttgtgggctcccgatgcggctgggaaatacactgagcctagggctatcggtacccgctacctcacccaccacctgtaataa

SEQ ID NO: 48 - DNA, 2208 bp, Adeno-associated virus 4
  modified_base (750)..(750): a, c, t, or g
  misc_feature (750)..(750): n is a, c, g, or t
atgactgacggttaccttccagattggctagaggacaacctctctgaaggcgttcgagagtggtgggcgctgcaacctggagcccctaaacccaaggcaaatcaacaacatcaggacaacgctcggggtcttgtgcttccgggttacaaatacctcggacccggcaacggactcgacaagggggaacccgtcaacgcagcggacgcggcagccctcgagcacgacaaggcctacgaccagcagctcaaggccggtgacaacccctacctcaagtacaaccacgccgacgcggagttccagcagcggcttcagggcgacacatcgtttgggggcaacctcggcagagcagtcttccaggccaaaaagagggttcttgaacctcttggtctggttgagcaagcgggtgagacggctcctggaaagaagagaccgttgattgaatccccccagcagcccgactcctccacgggtatcggcaaaaaaggcaagcagccggctaaaaagaagctcgttttcgaagacgaaactggagcaggcgacggaccccctgagggatcaacttccggagccatgtctgatgacagtgagatgcgtgcagcagctggcggagctgcagtcgagggsggacaaggtgccgatggagtgggtaatgcctcgggtgattggcattgcgattccacctggtctgagggccacgtcacgaccaccagcaccagaacctgggtcttgcccacctacaacaaccacctntacaagcgactcggagagagcctgcagtccaacacctacaacggattctccaccccctggggatactttgacttcaaccgcttccactgccacttctcaccacgtgactggcagcgactcatcaacaacaactggggcatgcgacccaaagccatgcgggtcaaaatcttcaacatccaggtcaaggaggtcacgacgtcgaacggcgagacaacggtggctaataaccttaccagcacggttcagatctttgcggactcgtcgtacgaactgccgtacgtgatggatgcgggtcaagagggcagcctgcctccttttcccaacgacgtctttatggtgccccagtacggctactgtggactggtgaccggcaacacttcgcagcaacagactgacagaaatgccttctactgcctggagtactttccttcgcagatgctgcggactggcaacaactttgaaattacgtacagttttgagaaggtgcctttccactcgatgtacgcgcacagccagagcctggaccggctgatgaaccctctcatcgaccagtacctgtggggactgcaatcgaccaccaccggaaccaccctgaatgccgggactgccaccaccaactttaccaagctgcggcctaccaacttttccaactttaaaaagaactggctgcccgggccttcaatcaagcagcagggcttctcaaagactgccaatcaaaactacaagatccctgccaccgggtcagacagtctcatcaaatacgagacgcacagcactctggacggaagatggagtgccctgacccccggacctccaatggccacggctggacctgcggacagcaagttcagcaacagccagctcatctttgcggggcctaaacagaacggcaacacggccaccgtacccgggactctgatcttcacctctgaggaggagctggcagccaccaacgccaccgatacggacatgtggggcaacctacctggcggtgaccagagcaacagcaacctgccgaccgtggacagactgacagccttgggagccgtgcctggaatggtctggcaaaacagagacatttactaccagggtcccatttgggccaagattcctcataccgatggacactttcacccctcaccgctgattggtgggtttgggctgaaacacccgcctcctcaaatttttatcaagaacaccccggtacctgcgaatcctgcaacgaccttcagctctactccggtaaactccttcattactcagtacagcactggccaggtgtcggtgcagattgactgggagatccagaaggagcggtccaaacgctggaaccccgaggtccagtttacctccaactacggacagcaaaactctctgttgtgggctcccgatgcggctgggaaatacactgagcctagggctatcggtacccgctacctcacccaccacctgtaataa

SEQ ID NO: 49 - DNA, 1872 bp, Adeno-associated virus 4
atgccggggttctacgagatcgtgctgaaggtgcccagcgacctggacgagcacctgcccggcatttctgactcttttgtgagctgggtggccgagaaggaatgggagctgccgccggattctgacatggacttgaatctgattgagcaggcacccctgaccgtggccgaaaagctgcaacgcgagttcctggtcgagtggcgccgcgtgagtaaggccccggaggccctcttctttgtccagttcgagaagggggacagctacttccacctgcacatcctggtggagaccgtgggcgtcaaatccatggtggtgggccgctacgtgagccagattaaagagaagctggtgacccgcatctaccgcggggtcgagccgcagcttccgaactggttcgcggtgaccaagacgcgtaatggcgccggaggcgggaacaaggtggtggacgactgctacatccccaactacctgctccccaagacccagcccgagctccagtgggcgtggactaacatggaccagtatataagcgcctgtttgaatctcgcggagcgtaaacggctggtggcgcagcatctgacgcacgtgtcgcagacgcaggagcagaacaaggaaaaccagaaccccaattctgacgcgccggtcatcaggtcaaaaacctccgccaggtacatggagctggtcgggtggctggtggaccgcgggatcacgtcagaaaagcaatggatccaggaggaccaggcgtcctacatctccttcaacgccgcctccaactcgcggtcacaaatcaaggccgcgctggacaatgcctccaaaatcatgagcctgacaaagacggctccggactacctggtgggccagaacccgccggaggacatttccagcaaccgcatctaccgaatcctcgagatgaacgggtacgatccgcagtacgcggcctccgtcttcctgggctgggcgcaaaagaagttcgggaagaggaacaccatctggctctttgggccggccacgacgggtaaaaccaacatcgcggaagccatcgcccacgccgtgcccttctacggctgcgtgaactggaccaatgagaactttccgttcaacgattgcgtcgacaagatggtgatctggtgggaggagggcaagatgacggccaaggtcgtagagagcgccaaggccatcctgggcggaagcaaggtgcgcgtggaccaaaagtgcaagtcatcggcccagatcgacccaactcccgtgatcgtcacctccaacaccaacatgtgcgcggtcatcgacggaaactcgaccaccttcgagcaccaacaaccactccaggaccggatgttcaagttcgagctcaccaagcgcctggagcacgactttggcaaggtcaccaagcaggaagtcaaagactttttccggtgggcgtcagatcacgtgaccgaggtgactcacgagttttacgtcagaaagggtggagctagaaagaggcccgcccccaatgacgcagatataagtgagcccaagcgggcctgtccgtcagttgcgcagccatcgacgtcagacgcggaagctccggtggactacgcggacaggtaccaaaacaaatgttctcgtcacgtgggtatgaatctgatgctttttccctgccggcaatgcgagagaatgaatcagaatgtggacatttgcttcacgcacggggtcatggactgtgccgagtgcttccccgtgtcagaatctcaacccgtgtctgtcgtcagaaagcggacgtatcagaaactgtgtccgattcatcacatcatggggagggcgcccgaggtggcctgctcggcctgcgaactggccaatgtggacttggatgactgtgacatggaacaataa

SEQ ID NO: 50 - DNA, 1611 bp, Adeno-associated virus 4
atgccggggttctacgagatcgtgctgaaggtgcccagcgacctggacgagcacctgcccggcatttctgactcttttgtgagctgggtggccgagaaggaatgggagctgccgccggattctgacatggacttgaatctgattgagcaggcacccctgaccgtggccgaaaagctgcaacgcgagttcctggtcgagtggcgccgcgtgagtaaggccccggaggccctcttctttgtccagttcgagaagggggacagctacttccacctgcacatcctggtggagaccgtgggcgtcaaatccatggtggtgggccgctacgtgagccagattaaagagaagctggtgacccgcatctaccgcggggtcgagccgcagcttccgaactggttcgcggtgaccaagacgcgtaatggcgccggaggcgggaacaaggtggtggacgactgctacatccccaactacctgctccccaagacccagcccgagctccagtgggcgtggactaacatggaccagtatataagcgcctgtttgaatctcgcggagcgtaaacggctggtggcgcagcatctgacgcacgtgtcgcagacgcaggagcagaacaaggaaaaccagaaccccaattctgacgcgccggtcatcaggtcaaaaacctccgccaggtacatggagctggtcgggtggctggtggaccgcgggatcacgtcagaaaagcaatggatccaggaggaccaggcgtcctacatctccttcaacgccgcctccaactcgcggtcacaaatcaaggccgcgctggacaatgcctccaaaatcatgagcctgacaaagacggctccggactacctggtgggccagaacccgccggaggacatttccagcaaccgcatctaccgaatcctcgagatgaacgggtacgatccgcagtacgcggcctccgtcttcctgggctgggcgcaaaagaagttcgggaagaggaacaccatctggctctttgggccggccacgacgggtaaaaccaacatcgcggaagccatcgcccacgccgtgcccttctacggctgcgtgaactggaccaatgagaactttccgttcaacgattgcgtcgacaagatggtgatctggtgggaggagggcaagatgacggccaaggtcgtagagagcgccaaggccatcctgggcggaagcaaggtgcgcgtggaccaaaagtgcaagtcatcggcccagatcgacccaactcccgtgatcgtcacctccaacaccaacatgtgcgcggtcatcgacggaaactcgaccaccttcgagcaccaacaaccactccaggaccggatgttcaagttcgagctcaccaagcgcctggagcacgactttggcaaggtcaccaagcaggaagtcaaagactttttccggtgggcgtcagatcacgtgaccgaggtgactcacgagttttacgtcagaaagggtggagctagaaagaggcccgcccccaatgacgcagatataagtgagcccaagcgggcctgtccgtcagttgcgcagccatcgacgtcagacgcggaagctccggtggactacgcggacagattggctagaggacaacctctctga

SEQ ID NO: 51 - DNA, 1872 bp, Adeno-associated virus 4; identical to SEQ ID NO: 49

SEQ ID NO: 52 - DNA, 1617 bp, Adeno-associated virus 4
  modified_base (162)..(162): a, c, t, or g
  misc_feature (162)..(162): n is a, c, g, or t
atgcgtgcagcagctggcggagctgcagtcgagggsggacaaggtgccgatggagtgggtaatgcctcgggtgattggcattgcgattccacctggtctgagggccacgtcacgaccaccagcaccagaacctgggtcttgcccacctacaacaaccacctntacaagcgactcggagagagcctgcagtccaacacctacaacggattctccaccccctggggatactttgacttcaaccgcttccactgccacttctcaccacgtgactggcagcgactcatcaacaacaactggggcatgcgacccaaagccatgcgggtcaaaatcttcaacatccaggtcaaggaggtcacgacgtcgaacggcgagacaacggtggctaataaccttaccagcacggttcagatctttgcggactcgtcgtacgaactgccgtacgtgatggatgcgggtcaagagggcagcctgcctccttttcccaacgacgtctttatggtgccccagtacggctactgtggactggtgaccggcaacacttcgcagcaacagactgacagaaatgccttctactgcctggagtactttccttcgcagatgctgcggactggcaacaactttgaaattacgtacagttttgagaaggtgcctttccactcgatgtacgcgcacagccagagcctggaccggctgatgaaccctctcatcgaccagtacctgtggggactgcaatcgaccaccaccggaaccaccctgaatgccgggactgccaccaccaactttaccaagctgcggcctaccaacttttccaactttaaaaagaactggctgcccgggccttcaatcaagcagcagggcttctcaaagactgccaatcaaaactacaagatccctgccaccgggtcagacagtctcatcaaatacgagacgcacagcactctggacggaagatggagtgccctgacccccggacctccaatggccacggctggacctgcggacagcaagttcagcaacagccagctcatctttgcggggcctaaacagaacggcaacacggccaccgtacccgggactctgatcttcacctctgaggaggagctggcagccaccaacgccaccgatacggacatgtggggcaacctacctggcggtgaccagagcaacagcaacctgccgaccgtggacagactgacagccttgggagccgtgcctggaatggtctggcaaaacagagacatttactaccagggtcccatttgggccaagattcctcataccgatggacactttcacccctcaccgctgattggtgggtttgggctgaaacacccgcctcctcaaatttttatcaagaacaccccggtacctgcgaatcctgcaacgaccttcagctctactccggtaaactccttcattactcagtacagcactggccaggtgtcggtgcagattgactgggagatccagaaggagcggtccaaacgctggaaccccgaggtccagtttacctccaactacggacagcaaaactctctgttgtgggctcccgatgcggctgggaaatacactgagcctagggctatcggtacccgctacctcacccaccacctgtaa

SEQ ID NO: 53 - DNA, 939 bp, Adeno-associated virus 4
atggagctggtcgggtggctggtggaccgcgggatcacgtcagaaaagcaatggatccaggaggaccaggcgtcctacatctccttcaacgccgcctccaactcgcggtcacaaatcaaggccgcgctggacaatgcctccaaaatcatgagcctgacaaagacggctccggactacctggtgggccagaacccgccggaggacatttccagcaaccgcatctaccgaatcctcgagatgaacgggtacgatccgcagtacgcggcctccgtcttcctgggctgggcgcaaaagaagttcgggaagaggaacaccatctggctctttgggccggccacgacgggtaaaaccaacatcgcggaagccatcgcccacgccgtgcccttctacggctgcgtgaactggaccaatgagaactttccgttcaacgattgcgtcgacaagatggtgatctggtgggaggagggcaagatgacggccaaggtcgtagagagcgccaaggccatcctgggcggaagcaaggtgcgcgtggaccaaaagtgcaagtcatcggcccagatcgacccaactcccgtgatcgtcacctccaacaccaacatgtgcgcggtcatcgacggaaactcgaccaccttcgagcaccaacaaccactccaggaccggatgttcaagttcgagctcaccaagcgcctggagcacgactttggcaaggtcaccaagcaggaagtcaaagactttttccggtgggcgtcagatcacgtgaccgaggtgactcacgagttttacgtcagaaagggtggagctagaaagaggcccgcccccaatgacgcagatataagtgagcccaagcgggcctgtccgtcagttgcgcagccatcgacgtcagacgcggaagctccggtggactacgcggacagattggctagaggacaacctctctga

SEQ ID NO: 54 - DNA, 1197 bp, Adeno-associated virus 4
atggagctggtcgggtggctggtggaccgcgggatcacgtcagaaaagcaatggatccaggaggaccaggcgtcctacatctccttcaacgccgcctccaactcgcggtcacaaatcaaggccgcgctggacaatgcctccaaaatcatgagcctgacaaagacggctccggactacctggtgggccagaacccgccggaggacatttccagcaaccgcatctaccgaatcctcgagatgaacgggtacgatccgcagtacgcggcctccgtcttcctgggctgggcgcaaaagaagttcgggaagaggaacaccatctggctctttgggccggccacgacgggtaaaaccaacatcgcggaagccatcgcccacgccgtgcccttctacggctgcgtgaactggaccaatgagaactttccgttcaacgattgcgtcgacaagatggtgatctggtgggaggagggcaagatgacggccaaggtcgtagagagcgccaaggccatcctgggcggaagcaaggtgcgcgtggaccaaaagtgcaagtcatcggcccagatcgacccaactcccgtgatcgtcacctccaacaccaacatgtgcgcggtcatcgacggaaactcgaccaccttcgagcaccaacaaccactccaggaccggatgttcaagttcgagctcaccaagcgcctggagcacgactttggcaaggtcaccaagcaggaagtcaaagactttttccggtgggcgtcagatcacgtgaccgaggtgactcacgagttttacgtcagaaagggtggagctagaaagaggcccgcccccaatgacgcagatataagtgagcccaagcgggcctgtccgtcagttgcgcagccatcgacgtcagacgcggaagctccggtggactacgcggacaggtaccaaaacaaatgttctcgtcacgtgggtatgaatctgatgctttttccctgccggcaatgcgagagaatgaatcagaatgtggacatttgcttcacgcacggggtcatggactgtgccgagtgcttccccgtgtcagaatctcaacccgtgtctgtcgtcagaaagcggacgtatcagaaactgtgtccgattcatcacatcatggggagggcgcccgaggtggcctgctcggcctgcgaactggccaatgtggacttggatgactgtgacatggaacaa

SEQ ID NO: 55 - DNA, 245 bp, Adeno-associated virus 4
ctccatcatctaggtttgcccactgacgtcaatgtgacgtcctagggttagggaggtccctgtattagcagtcacgtgagtgtcgtatttcgcggagcgtagcggagcgcataccaagctgccacgtcacagccacgtggtccgtttgcgacagtttgcgacaccatgtggtcaggagggtatataaccgcgagtgagccagcgaggagctccattttgcccgcgaattttgaacgagcagcagc

SEQ ID NO: 56 - protein, 313 aa, Adeno-associated virus 4
  MOD_RES (313)..(313): Any amino acid
MELVGWLVDRGITSEKQWIQEDQASYISFNAASNSRSQIKAALDNASKIMSLTKTAPDYLVGQNPPEDISSNRIYRILEMNGYDPQYAASVFLGWAQKKFGKRNTIWLFGPATTGKTNIAEAIAHAVPFYGCVNWTNENFPFNDCVDKMVIWWEEGKMTAKVVESAKAILGGSKVRVDQKCKSSAQIDPTPVIVTSNTNMCAVIDGNSTTFEHQQPLQDRMFKFELTKRLEHDFGKVTKQEVKDFFRWASDHVTEVTHEFYVRKGGARKRPAPNDADISEPKRACPSVAQPSTSDAEAPVDYADRLARGQPLX

SEQ ID NO: 57 - protein, 399 aa, Adeno-associated virus 4
MELVGWLVDRGITSEKQWIQEDQASYISFNAASNSRSQIKAALDNASKIMSLTKTAPDYLVGQNPPEDISSNRIYRILEMNGYDPQYAASVFLGWAQKKFGKRNTIWLFGPATTGKTNIAEAIAHAVPFYGCVNWTNENFPFNDCVDKMVIWWEEGKMTAKVVESAKAILGGSKVRVDQKCKSSAQIDPTPVIVTSNTNMCAVIDGNSTTFEHQQPLQDRMFKFELTKRLEHDFGKVTKQEVKDFFRWASDHVTEVTHEFYVRKGGARKRPAPNDADISEPKRACPSVAQPSTSDAEAPVDYADRYQNKCSRHVGMNLMLFPCRQCERMNQNVDICFTHGVMDCAECFPVSESQPVSVVRKRTYQKLCPIHHIMGRAPEVACSACELANVDLDDCDMEQ

SEQ ID NO: 58 - protein, 623 aa, Adeno-associated virus 4
MPGFYEIVLKVPSDLDEHLPGISDSFVSWVAEKEWELPPDSDMDLNLIEQAPLTVAEKLQREFLVEWRRVSKAPEALFFVQFEKGDSYFHLHILVETVGVKSMVVGRYVSQIKEKLVTRIYRGVEPQLPNWFAVTKTRNGAGGGNKVVDDCYIPNYLLPKTQPELQWAWTNMDQYISACLNLAERKRLVAQHLTHVSQTQEQNKENQNPNSDAPVIRSKTSARYMELVGWLVDRGITSEKQWIQEDQASYISFNAASNSRSQIKAALDNASKIMSLTKTAPDYLVGQNPPEDISSNRIYRILEMNGYDPQYAASVFLGWAQKKFGKRNTIWLFGPATTGKTNIAEAIAHAVPFYGCVNWTNENFPFNDCVDKMVIWWEEGKMTAKVVESAKAILGGSKVRVDQKCKSSAQIDPTPVIVTSNTNMCAVIDGNSTTFEHQQPLQDRMFKFELTKRLEHDFGKVTKQEVKDFFRWASDHVTEVTHEFYVRKGGARKRPAPNDADISEPKRACPSVAQPSTSDAEAPVDYADRYQNKCSRHVGMNLMLFPCRQCERMNQNVDICFTHGVMDCAECFPVSESQPVSVVRKRTYQKLCPIHHIMGRAPEVACSACELANVDLDDCDMEQ

SEQ ID NO: 59 - protein, 537 aa, Adeno-associated virus 4
  MOD_RES (537)..(537): Any amino acid
MPGFYEIVLKVPSDLDEHLPGISDSFVSWVAEKEWELPPDSDMDLNLIEQAPLTVAEKLQREFLVEWRRVSKAPEALFFVQFEKGDSYFHLHILVETVGVKSMVVGRYVSQIKEKLVTRIYRGVEPQLPNWFAVTKTRNGAGGGNKVVDDCYIPNYLLPKTQPELQWAWTNMDQYISACLNLAERKRLVAQHLTHVSQTQEQNKENQNPNSDAPVIRSKTSARYMELVGWLVDRGITSEKQWIQEDQASYISFNAASNSRSQIKAALDNASKIMSLTKTAPDYLVGQNPPEDISSNRIYRILEMNGYDPQYAASVFLGWAQKKFGKRNTIWLFGPATTGKTNIAEAIAHAVPFYGCVNWTNENFPFNDCVDKMVIWWEEGKMTAKVVESAKAILGGSKVRVDQKCKSSAQIDPTPVIVTSNTNMCAVIDGNSTTFEHQQPLQDRMFKFELTKRLEHDFGKVTKQEVKDFFRWASDHVTEVTHEFYVRKGGARKRPAPNDADISEPKRACPSVAQPSTSDAEAPVDYADRLARGQPLX

SEQ ID NO: 60 - protein, 623 aa, Adeno-associated virus 4; identical to SEQ ID NO: 58

SEQ ID NO: 61 - protein, 544 aa, Adeno-associated virus 4
MSDDSEMRAAAGGAAVEGGQGADGVGNASGDWHCDSTWSEGHVTTTSTRTWVLPTYNNHLYKRLGESLQSNTYNGFSTPWGYFDFNRFHCHFSPRDWQRLINNNWGMRPKAMRVKIFNIQVKEVTTSNGETTVANNLTSTVQIFADSSYELPYVMDAGQEGSLPPFPNDVFMVPQYGYCGLVTGNTSQQQTDRNAFYCLEYFPSQMLRTGNNFEITYSFEKVPFHSMYAHSQSLDRLMNPLIDQYLWGLQSTTTGTTLNAGTATTNFTKLRPTNFSNFKKNWLPGPSIKQQGFSKTANQNYKIPATGSDSLIKYETHSTLDGRWSALTPGPPMATAGPADSKFSNSQLIFAGPKQNGNTATVPGTLIFTSEEELAATNATDTDMWGNLPGGDQSNSNLPTVDRLTALGAVPGMVWQNRDIYYQGPIWAKIPHTDGHFHPSPLIGGFGLKHPPPQIFIKNTPVPANPATTFSSTPVNSFITQYSTGQVSVQIDWEIQKERSKRWNPEVQFTSNYGQQNSLLWAPDAAGKYTEPRAIGTRYLTHHL

SEQ ID NO: 62 - protein, 734 aa, Adeno-associated virus 4
MTDGYLPDWLEDNLSEGVREWWALQPGAPKPKANQQHQDNARGLVLPGYKYLGPGNGLDKGEPVNAADAAALEHDKAYDQQLKAGDNPYLKYNHADAEFQQRLQGDTSFGGNLGRAVFQAKKRVLEPLGLVEQAGETAPGKKRPLIESPQQPDSSTGIGKKGKQPAKKKLVFEDETGAGDGPPEGSTSGAMSDDSEMRAAAGGAAVEGGQGADGVGNASGDWHCDSTWSEGHVTTTSTRTWVLPTYNNHLYKRLGESLQSNTYNGFSTPWGYFDFNRFHCHFSPRDWQRLINNNWGMRPKAMRVKIFNIQVKEVTTSNGETTVANNLTSTVQIFADSSYELPYVMDAGQEGSLPPFPNDVFMVPQYGYCGLVTGNTSQQQTDRNAFYCLEYFPSQMLRTGNNFEITYSFEKVPFHSMYAHSQSLDRLMNPLIDQYLWGLQSTTTGTTLNAGTATTNFTKLRPTNFSNFKKNWLPGPSIKQQGFSKTANQNYKIPATGSDSLIKYETHSTLDGRWSALTPGPPMATAGPADSKFSNSQLIFAGPKQNGNTATVPGTLIFTSEEELAATNATDTDMWGNLPGGDQSNSNLPTVDRLTALGAVPGMVWQNRDIYYQGPIWAKIPHTDGHFHPSPLIGGFGLKHPPPQIFIKNTPVPANPATTFSSTPVNSFITQYSTGQVSVQIDWEIQKERSKRWNPEVQFTSNYGQQNSLLWAPDAAGKYTEPRAIGTRYLTHHL

SEQ ID NO: 63 - protein, 598 aa, Adeno-associated virus 4
TAPGKKRPLIESPQQPDSSTGIGKKGKQPAKKKLVFEDETGAGDGPPEGSTSGAMSDDSEMRAAAGGAAVEGGQGADGVGNASGDWHCDSTWSEGHVTTTSTRTWVLPTYNNHLYKRLGESLQSNTYNGFSTPWGYFDFNRFHCHFSPRDWQRLINNNWGMRPKAMRVKIFNIQVKEVTTSNGETTVANNLTSTVQIFADSSYELPYVMDAGQEGSLPPFPNDVFMVPQYGYCGLVTGNTSQQQTDRNAFYCLEYFPSQMLRTGNNFEITYSFEKVPFHSMYAHSQSLDRLMNPLIDQYLWGLQSTTTGTTLNAGTATTNFTKLRPTNFSNFKKNWLPGPSIKQQGFSKTANQNYKIPATGSDSLIKYETHSTLDGRWSALTPGPPMATAGPADSKFSNSQLIFAGPKQNGNTATVPGTLIFTSEEELAATNATDTDMWGNLPGGDQSNSNLPTVDRLTALGAVPGMVWQNRDIYYQGPIWAKIPHTDGHFHPSPLIGGFGLKHPPPQIFIKNTPVPANPATTFSSTPVNSFITQYSTGQVSVQIDWEIQKERSKRWNPEVQFTSNYGQQNSLLWAPDAAGKYTEPRAIGTRYLTHHL

SEQ ID NO: 64 - DNA, 129 bp, Adeno-associated virus 4
ttggccactccctctatgcgcgctcgctcactcactcggccctgcggccagaggccggcagtctggagacctttggtgtccagggcagggccgagtgagtgagcgagcgcgcatagagggagtggccaa

SEQ ID NO: 65 - DNA, 125 bp, Adeno-associated virus 4
ttggccactccctctatgcgcgctcgctcactcactcggccctggagaccaaaggtctccagactgccggcctctggccggcagggccgagtgagtgagcgagcgcgcatagagggagtggccaa

SEQ ID NO: 66 - DNA, 4768 bp, Adeno-associated virus 4
  modified_base (3009)..(3009): a, c, t, or g
  misc_feature (3009)..(3009): n is a, c, g, or t
ttggccactccctctatgcgcgctcgctcactcactcggccctggagaccaaaggtctccagactgccggcctctggccggcagggccgagtgagtgagcgagcgcgcatagagggagtggccaactccatcatctaggtttgcccactgacgtcaatgtgacgtcctagggttagggaggtccctgtattagcagtcacgtgagtgtcgtatttcgcggagcgtagcggagcgcataccaagctgccacgtcacagccacgtggtccgtttgcgacagtttgcgacaccatgtggtcaggagggtatataaccgcgagtgagccagcgaggagctccattttgcccgcgaattttgaacgagcagcagccatgccggggttctacgagatcgtgctgaaggtgcccagcgacctggacgagcacctgcccggcatttctgactcttttgtgagctgggtggccgagaaggaatgggagctgccgccggattctgacatggacttgaatctgattgagcaggcacccctgaccgtggccgaaaagctgcaacgcgagttcctggtcgagtggcgccgcgtgagtaaggccccggaggccctcttctttgtccagttcgagaagggggacagctacttccacctgcacatcctggtggagaccgtgggcgtcaaatccatggtggtgggccgctacgtgagccagattaaagagaagctggtgacccgcatctaccgcggggtcgagccgcagcttccgaactggttcgcggtgaccaagacgcgtaatggcgccggaggcgggaacaaggtggtggacgactgctacatccccaactacctgctccccaagacccagcccgagctccagtgggcgtggactaacatggaccagtatataagcgcctgtttgaatctcgcggagcgtaaacggctggtggcgcagcatctgacgcacgtgtcgcagacgcaggagcagaacaaggaaaaccagaaccccaattctgacgcgccggtcatcaggtcaaaaacctccgccaggtacatggagctggtcgggtggctggtggaccgcgggatcacgtcagaaaagcaatggatccaggaggaccaggcgtcctacatctccttcaacgccgcctccaactcgcggtcacaaatcaaggccgcgctggacaatgcctccaaaatcatgagcctgacaaagacggctccggactacctggtgggccagaacccgccggaggacatttccagcaaccgcatctaccgaatcctcgagatgaacgggtacgatccgcagtacgcggcctccgtcttcctgggctgggcgcaaaagaagttcgggaagaggaacaccatctggctctttgggccggccacgacgggtaaaaccaacatcgcggaagccatcgcccacgccgtgcccttctacggctgcgtgaactggaccaatgagaactttccgttcaacgattgcgtcgacaagatggtgatctggtgggaggagggcaagatgacggccaaggtcgtagagagcgccaaggccatcctgggcggaagcaaggtgcgcgtggaccaaaagtgcaagtcatcggcccagatcgacccaactcccgtgatcgtcacctccaacaccaacatgtgcgcggtcatcgacggaaactcgaccaccttcgagcaccaacaaccactccaggaccggatgttcaagttcgagctcaccaagcgcctggagcacgactttggcaaggtcaccaagcaggaagtcaaagactttttccggtgggcgtcagatcacgtgaccgaggtgactcacgagttttacgtcagaaagggtggagctagaaagaggcccgcccccaatgacgcagatataagtgagcccaagcgggcctgtccgtcagttgcgcagccatcgacgtcagacgcggaagctccggtggactacgcggacaggtaccaaaacaaatgttctcgtcacgtgggtatgaatctgatgctttttccctgccggcaatgcgagagaatgaatcagaatgtggacatttgcttcacgcacggggtcatggactgtgccgagtgcttccccgtgtcagaatctcaacccgtgtctgtcgtcagaaagcggacgtatcagaaactgtgtccgattcatcacatcatggggagggcgcccgaggtggcctgctcggcctgcgaactggccaatgtggacttggatgactgtgacatggaacaataaatgactcaaaccagatatgactgacggttaccttccagattggctagaggacaacctctctgaaggcgttcgagagtggtgggcgctgcaacctggagcccctaaacccaaggcaaatcaacaacatcaggacaacgctcggggtcttgtgcttccgggttacaaatacctcggacccggcaacggactcgacaagggggaacccgtcaacgcagcggacgcggcagccctcgagcacgacaaggcctacgaccagcagctcaaggccggtgacaacccctacctcaagtacaaccacgccgacgcggagttccagcagcggcttcagggcgacacaccgtttgggggcaacctcggcagagcagtcttccaggccaaaaagagggttcttgaacctcttggtctggttgagcaagcgggtgagacggctcctggaaagaagagaccgttgattgaatccccccagcagcccgactcctccacgggtatcggcaaaaaaggcaagcagccggctaaaaagaagctcgttttcgaagacgaaactggagcaggcgacggaccccctgagggatcaacttccggagccatgtctgatgacagtgagatgcgtgcagcagctggcggagctgcagtcgagggsggacaaggtgccgatggagtgggtaatgcctcgggtgattggcattgcgattccacctggtctgagggccacgtcacgaccaccagcaccagaacctgggtcttgcccacctacaacaaccacctntacaagcgactcggagagagcctgcagtccaacacctacaacggattctccaccccctggggatactttgacttcaaccgcttccactgccacttctcaccacgtgactggcagcgactcatcaacaacaactggggcatgcgacccaaagccatgcgggtcaaaatcttcaacatccaggtcaaggaggtcacgacgtcgaacggcgagacaacggtggctaataaccttaccagcacggttcagatctttgcggactcgtcgtacgaactgccgtacgtgatggatgcgggtcaagagggcagcctgcctccttttcccaacgacgtctttatggtgccccagtacggctactgtggactggtgaccggcaacacttcgcagcaacagactgacagaaatgccttctactgcctggagtactttccttcgcagatgctgcggactggcaacaactttgaaattacgtacagttttgagaaggtgcctttccactcgatgtacgcgcacagccagagcctggaccggctgatgaaccctctcatcgaccagtacctgtggggactgcaatcgaccaccaccggaaccaccctgaatgccgggactgccaccaccaactttaccaagctgcggcctaccaacttttccaactttaaaaagaactggctgcccgggccttcaatcaagcagcagggcttctcaaagactgccaatcaaaactacaagatccctgccaccgggtcagacagtctcatcaaatacgagacgcacagcactctggacggaagatggagtgccctgacccccggacctccaatggccacggctggacctgcggacagcaagttcagcaacagccagctcatctttgcggggcctaaacagaacggcaacacggccaccgtacccgggactctgatcttcacctctgaggaggagctggcagccaccaacgccaccgatacggacatgtggggcaacctacctggcggtgaccagagcaacagcaacctgccgaccgtggacagactgacagccttgggagccgtgcctggaatggtctggcaaaacagagacatttactaccagggtcccatttgggccaagattcctcataccgatggacactttcacccctcaccgctgattggtgggtttgggctgaaacacccgcctcctcaaatttttatcaagaacaccccggtacctgcgaatcctgcaacgaccttcagctctactccggtaaactccttcattactcagtacagcactggccaggtgtcggtgcagattgactgggagatccagaaggagcggtccaaacgctggaaccccgaggtccagtttacctccaactacggacagcaaaactctctgttgtgggctcccgatgcggctgggaaatacactgagcctagggctatcggtacccgctacctcacccaccacctgtaataacctgttaatcaataaaccggtttattcgtttcagttgaactttggtctccgtgtccttcttatcttatctcgtttccatggctactgcgtacataagcagcggcctgcggcgcttgcgcttcgcggtttacaactgccggttaatcagtaacttctggcaaaccatgatgatggagttggccactccctctatgcgcgctcgctcactcactcggccctggagaccaaaggtctccagactgccggcctctggccggcagggccgagtgagtgagcgagcgcgcatagagggagtggccaa

SEQ ID NO: 67 - DNA, 3098 bp, Adeno-associated virus
gaattcgccctttctacggctgcgtcaactggaccaatgagaactttcccttcaacgattgcgtcgacaagatggtgatctggtgggaggagggcaagatgacggccaaggtcgtggagtccgccaaggccattctcggcggcagcaaggtgcgcgtggaccaaaagtgcaagtcttccgcccagatcgatcccacccccgtgatcgtcacttccaacaccaacatgtgcgctgtgattgacgggaacagcaccaccttcgagcaccagcagccgttacaagaccggatgttcaaatttgaactcacccgccgtctggagcacgactttggcaaggtgacaaagcaggaagtcaaagagttcttccgctgggcgcaggatcacgtgaccgaggtggcgcatgagttctacgtcagaaagggtggagccaacaagagacccgcccccgatgacgcggataaaagcgagcccaagcgggcctgcccctcagtcgcggatccatcgacgtcagacgcggaaggagctccggtggactttgccgacaggtaccaaaacaaatgttctcgtcacgcgggcatgcttcagatgctgtttccctgcaagacatgcgagagaatgaatcagaatttcaacatttgcttcacgcacgggaccagagactgttcagaatgtttccccggcgtgtcagaatctcaaccggtcgtcagaaagaggacgtatcggaaactctgtgccattcatcatctgctggggcgggctcccgagattgcttgctcggcctgcgatctggtcaacgtggacctggatgaccgtgtttctgagcaataaatgacttaaaccaggtatggctgccgatggttatcttccagattggctcgaggacaacctctctgagggcattcgcgagtggtgggacttgaaacctggagccccgaaacccaaagccaaccagcaaaagcaggacgacggccggggtctggtgcttcctggctacaagtacctcggacccttcaacggactcgacaagggagagccggtcaacgaggcagacgccgcggccctcgagcacgacaaggcctacgacaagcagctcgagcagggggacaacccgtacctcaagtacaaccacgccgacgccgagtttcaggagcgtcttcaagaagatacgtcttttgggggcaacctcgggcgagcagtcttccaggccaagaagcgggttctcgaacctctcggtctggttgaggaaggcgctaagacggctcctggaaagaagagacccatagaatcccccgactcctccacgggcatcggcaagaaaggccagcagcccgctaaaaagaagctcaactttgggcagactggcgactcagagtcagtgcccgacccccaacctctcggagaacctcccgccgcgccctcaggtctgggatctggtacaatggctgcaggcggtggcgcaccaatggcagacaataacgaaggcgccgacggagtgggtaatgcctccggaaattggcattgcgattccacatggctgggcgacagagtcatcaccaccagcacccgcacctgggccctgcccacctacaacaaccacctctacaagcagatatcaagtcagagcggggctaccaacgacaaccacttcttcggctacagcaccccctggggctattttgacttcaacagattccactgccacttctcaccacgtgactggcagcgactcatcaacaacaactggggattccggcccagaaagctgcggttcaagttgttcaacatccaggtcaaggaggtcacgacgaacgacggcgttacgaccatcgctaataaccttaccagcacgattcaggtcttctcggactcggagtaccaactgccgtacgtcctcggctctgcgcaccagggctgcctccctccgttccctgcggacgtgttcatgattcctcagtacggatatctgactctaaacaacggcagtcagtctgtgggacgttcctccttctactgcctggagtactttccttctcagatgctgagaacgggcaataactttgaattcagctacacctttgaggaagtgcctttccacagcagctatgcgcacagccagagcctggaccggctgatgaatcccctcatcgaccagtacctgtactacctggcccggacccagagcactacggggtccacaagggagctgcagttccatcaggctgggcccaacaccatggccgagcaatcaaagaactggctgcccggaccctgttatcggcagcagagactgtcaaaaaacatagacagcaacaacaacagtaactttgcctggaccggggccactaaataccatctgaatggtagaaattcattaaccaacccgggcgtagccatggccaccaacaaggacgacgaggaccagttctttcccatcaacggagtgctggtttttggcgaaacgggggctgccaacaagacaacgctggaaaacgtgctaatgaccagcgaggaggagatcaaaaccaccaatcccgtggctacagaagaatacggtgtggtctccagcaacctgcaatcgtctacggccggaccccagacacagactgtcaacagccagggggctctgcccggcatggtctggcagaaccgggacgtgtacctgcagggtcccatctgggccaaaattcctcacacggacggcaactttcacccgtctcccctgatgggcggatttggactcaaacacccgcctcctcaaattctcatcaaaaacaccccggtacctgctaatcctccagaggtgtttactcctgccaagtttgcctcatttatcacgcagtacagcaccggccaggtcagcgtggagatcgagtgggaactgcagaaagaaaacagcaaacgctggaatccagagattcagtacacctcaaattatgccaagtctaataatgtggaatttgctgtcaacaacgaaggggtttatactgagcctcgccccattggcacccgttacctcacccgtaacctgtaattgcctgttaatcaataaaccggttaattcgtttcagttgaactttggtctctgcgaagggcgaattc

SEQ ID NO: 68 - protein, 728 aa, Artificial Sequence
  Synthetic polypeptide
MAADGYLPDWLEDNLSEGIREWWDLKPGAPKPKANQQKQDDGRGLVLPGYKYLGPFNGLDKGEPVNEADAAALEHDKAYDKQLEQGDNPYLKYNHADAEFQERLQEDTSFGGNLGRAVFQAKKRVLEPLGLVEEGAKTAPGKKRPIESPDSSTGIGKKGQQPAKKKLNFGQTGDSESVPDPQPLGEPPAAPSGLGSGTMAAGGGAPMADNNEGADGVGNASGNWHCDSTWLGDRVITTSTRTWALPTYNNHLYKQISSQSGATNDNHFFGYSTPWGYFDFNRFHCHFSPRDWQRLINNNWGFRPRKLRFKLFNIQVKEVTTNDGVTTIANNLTSTIQVFSDSEYQLPYVLGSAHQGCLPPFPADVFMIPQYGYLTLNNGSQSVGRSSFYCLEYFPSQMLRTGNNFEFSYTFEEVPFHSSYAHSQSLDRLMNPLIDQYLYYLARTQSTTGSTRELQFHQAGPNTMAEQSKNWLPGPCYRQQRLSKNIDSNNNSNFAWTGATKYHLNGRNSLTNPGVAMATNKDDEDQFFPINGVLVFGETGAANKTTLENVLMTSEEEIKTTNPVATEEYGVVSSNLQSSTAGPQTQTVNSQGALPGMVWQNRDVYLQGPIWAKIPHTDGNFHPSPLMGGFGLKHPPPQILIKNTPVPANPPEVFTPAKFASFITQYSTGQVSVEIEWELQKENSKRWNPEIQYTSNYAKSNNVEFAVNNEGVYTEPRPIGTRYLTRNL

SEQ ID NO: 69 - DNA, 2495 bp, Artificial Sequence
  Synthetic polynucleotide
gaattcgccctttctacggctgcgtcaactagaccaatgagaactttcccttcaacgattgcgtcgacaagatggtgatctggtgggaggagggcaagatgacggccaaggtcgtggagtccgccaaggccattcatcatctgctggggcgggctcccgagattgcttgctcggcctgcgatctggtcaacgtggacctggatgactgtgtttctgagcaataaatgacttaaaccaggtatggctgccgatggttatcttccagattggctcgaggacaacctctctgagggcattcgcgagtggtgggacttgaaacctggagccccgaaacccaaagccaaccagcaaaagcaggacgacggccggggtctggtgcttcctggctacaagtacctcggacccttcaacggactcgacaagggagagccggtcaacgaggcagacgccgcggccctcgagcacgacaaggcctacgacaagcagctcgagcagggggacaacccgtacctcaagtacaaccacgccgacgccgagtttcaggagcgtcttcaagaagatacgtcttttgggggcaacctcgggcgagcagtcttccaggccaagaagcgggttctcgaacctctcggtctggttgaggaaggcgctaagacggctcctggaaagaagagacccatagaatcccccgactcctccacgggcatcggcaagaaaggccagcagcccgctaaaaagaagctcaactttgggcagactggcgactcagagtcagtgcccgaccctcaaccaatcggagaaccccccgcaggcccctctggtctgggatctggtacaatggctgcaggcggtggcgctccaatggcagacaataacgaaggcgccgacggagtgggtaatgcctccggaaattggcattgcgattccacatggctgggcgacagagtcatcaccaccagcacccgcacctgggccctgcccacctacaacaaccacctctacaagcagatatcaagtcagagcggggctaccaacgacaaccacttcttcggctacagcaccccctggggctattttgacttcaacagattccactgccacttctcaccacgtgactggcagcgactcatcaacaacaactggggattccggcccagaaagctgcggttcaagttgttcaacatccaggtcaaggaggtcacgacgaacgacggcgttacgaccatcgctaataaccttaccagcacgattcaggtcttctcggactcggagtaccaactgccgtacgtcctcggctctgcgcaccagggctgcctccctccgttccctgcggacgtgttcatgattcctcagtacggatatctgactctaaacaacggcagtcagtctgtgggacgttcctccttctactgcctggagtactttccttctcagatgctgagaacgggcaataactttgaattcagctacacctttgaggaagtgcctttccacagcagctatgcgcacagccagagcctggaccggctgatgaatcccctcatcgaccagtacctgtactacctggcccggacccagagcactacggggtccacaagggagctgcagttccatcaggctgggcccaacaccatggccgagcaatcaaagaactggctgcccggaccctgttatcggcagcagagactgtcaaaaaacatagacagcaacaacaccagtaactttgcctggaccggggccactaaataccatctgaatggtagaaattcattaaccaacccgggcgtagccatggccaccaacaaggacgacgaggaccagttctttcccatcaacggagtgctggtttttggcaaaacgggggctgccaacaagacaacgctggaaaacgtgctaatgaccagcgaggaggagatcaaaaccaccaatcccgtggctacagaacagtacggtgtggtctccagcaacctgcaatcgtctacggccggaccccagacacagactgtcaacagccagggggctctgcccggcatggtctggcagaaccgggacgtgtacctgcagggtcccatctgggccaaaattcctcacacggacggcaactttcacccgtctcccctgatgggcggatttggactcaaacacccgcctcctcaaattctcatcaaaaacaccccggtacctgctaatcctccagaggtgtttactcctgccaagtttgcctcatttatcacgcagtacagcaccggccaggtcagcgtggagatcgagtgggaactgcagaaagaaaacagcaaacgctggaatccagagattcagtacacctcaaattatgccaagtctaataatgtggaatttgctgtcaacaacgaaggggtttatactgagcctcgccccattggcacccgttacctcacccgtaacctgtaattgcctgttaatcaataaaccggttaattcgtttcagttgaactttggtctctgcgaagggcgaattc

SEQ ID NO: 70 - protein, 728 aa, Artificial Sequence
  Synthetic polypeptide
MAADGYLPDWLEDNLSEGIREWWDLKPGAPKPKANQQKQDDGRGLVLPGYKYLGPFNGLDKGEPVNEADAAALEHDKAYDKQLEQGDNPYLKYNHADAEFQERLQEDTSFGGNLGRAVFQAKKRVLEPLGLVEEGAKTAPGKKRPIESPDSSTGIGKKGQQPAKKKLNFGQTGDSESVPDPQPIGEPPAGPSGLGSGTMAAGGGAPMADNNEGADGVGNASGNWHCDSTWLGDRVITTSTRTWALPTYNNHLYKQISSQSGATNDNHFFGYSTPWGYFDFNRFHCHFSPRDWQRLINNNWGFRPRKLRFKLFNIQVKEVTTNDGVTTIANNLTSTIQVFSDSEYQLPYVLGSAHQGCLPPFPADVFMIPQYGYLTLNNGSQSVGRSSFYCLEYFPSQMLRTGNNFEFSYTFEEVPFHSSYAHSQSLDRLMNPLIDQYLYYLARTQSTTGSTRELQFHQAGPNTMAEQSKNWLPGPCYRQQRLSKNIDSNNTSNFAWTGATKYHLNGRNSLTNPGVAMATNKDDEDQFFPINGVLVFGKTGAANKTTLENVLMTSEEEIKTTNPVATEQYGVVSSNLQSSTAGPQTQTVNSQGALPGMVWQNRDVYLQGPIWAKIPHTDGNFHPSPLMGGFGLKHPPPQILIKNTPVPANPPEVFTPAKFASFITQYSTGQVSVEIEWELQKENSKRWNPEIQYTSNYAKSNNVEFAVNNEGVYTEPRPIGTRYLTRNL

SEQ ID NO: 71 - DNA, 2504 bp, Artificial Sequence
  Synthetic polynucleotide
gaattcgccctttctacggctgcgtcaactggaccaatgagaactttcccttcaacgattgcgtcgacaagatggtgatctggtgggaggagggcaagatgacggccaaggtcgtggagtccgccaaggccattcatcatctgctggggcgggctcccgagattgcttgctcggcctgcgatctggtcaacgtggacctggatgactgtgtttctgagcaataaatgacttaaaccaggtatggctgccgatggttatcttccagattggctcgaggacaacctctctgagggcattcgcgagtggtgggacttgaaacctggagccccgaaacccaaagccaaccagcaaaagcaggacgacggccggggtctggtgcttcctggctacaagtacctcggacccttcaacggactcgacaagggagagccggtcaacgaggcagacgccgcggccctcgagcacgacaaggcctacgacaagcagctcgagcagggggacaacccgtacctcaagtacaaccacgccgacgccgagtttcaggagcgtcttcaagaagatacgtcttttgggggcaacctcgggcgagcagtcttccaggccaagaagcgggttctcgaacctctcggtctggttgaggaaggcgctaagacggctcctggaaagaagagacccatagaatcccccgactcctccacgggcatcggcaagaaaggccagcagcccgctaaaaagaagctcaactttgggcagactggcgactcagagtcagtgcccgaccctcaaccaatcggagaaccccccgcaggcccctctggtctgggatctggtacaatggctgcaggcggtggcgctccaatggcagacaataacgaaggcgccgacggagtgggtaatgcctccggaaattggcattgcgattccacatggctgggcgacagagtcatcaccaccagcacccgcacctgggccctgcccacctacaacaaccacctctacaagcagatatcaagtcagagcggggctaccaacgacaaccacttcttcggctacagcaccccctggggctattttgacttcaacagattccactgccacttctcatcacgtgactggcagcgactcatcaacaacaactggggattccggcccaagagactcaacttcaagctcttcaacatccaggtcaaggaggtcacgcagaatgaaggcaccaagaccatcgccaataaccttaccagcacgattcaggtctttacggactcggaataccggctcccgtacgtcctcggctctgcgcaccagggctgcctgcctccgttcccggcggacgtcttcatgattcctcagtacgggtacctgactctgaacaacggcagtcaggccgtgggccgttcctccttctactgcctggagtactttccttctcaaatgctgagaacgggcaacaactttgagttcagctaccagtttgaggacgtgccttttcacagcagctacgcgcacagccaaagcctggaccggctgatgaaccccctcatcgaccagtacctgtactacctgtctcggactcagtccacgggaggtaccgcaggaactcagcagttgctattttctcaggccgggcctaataacatgtcggctcaggccaaaaactggctacccgggccctgctaccggcagcaacgcgtctccacgacactgtcgcaaaataacaacagcaactttgcttggaccggtgccaccaagtatcatctgaatggcagagactctctggtaaatcccggtgtcgctatggcaacgcacaaggacgacgaagagcgattttttccatccagcggagtcttgatgtttgggaaacagggagctggaaaagacaacgtggactatagcagcgttatgctaaccagtgaggaagaaatcaaaaccaccaacccagtggccacagaacagtacggcgtggtggccgataacctgcaacagcaaaacgccgctcctattgtaggggccgtcaacagtcaaggagccttacctggcatggtctggcagaaccgggacgtgtacctgcagggtcctatctgggccaagattcctcacacggacggcaactttcatccttcgccgctgatgggaggctttggactgaaacacccgcctcctcagatcctgattaagaatacacctgttcccgcggatcctccaactaccttcagtcaagccaagccggcgtcgttcatcacgcagtacagcaccggacaggtcagcgtggaaattgaatgggagctgcagaaagagaacagcaagcgctggaacccagagattcagtatacttccaactactacaaatctacaaatgtggactttgctgtcaatactgagggtacttattcagagcctcgccccattggcacccgttacctcacccgtaacctgtaattgcctgttaatcaataaaccggttaattcgtttcagttgaactttggtctctgcgaagggcgaattc

SEQ ID NO: 72 - protein, 731 aa, Artificial Sequence
  Synthetic polypeptide
MAADGYLPDWLEDNLSEGIREWWDLKPGAPKPKANQQKQDDGRGLVLPGYKYLGPFNGLDKGEPVNEADAAALEHDKAYDKQLEQGDNPYLKYNHADAEFQERLQEDTSFGGNLGRAVFQAKKRVLEPLGLVEEGAKTAPGKKRPIESPDSSTGIGKKGQQPAKKKLNFGQTGDSESVPDPQPIGEPPAGPSGLGSGTMAAGGGAPMADNNEGADGVGNASGNWHCDSTWLGDRVITTSTRTWALPTYNNHLYKQISSQSGATNDNHFFGYSTPWGYFDFNRFHCHFSSRDWQRLINNNWGFRPKRLNFKLFNIQVKEVTQNEGTKTIANNLTSTIQVFTDSEYRLPYVLGSAHQGCLPPFPADVFMIPQYGYLTLNNGSQAVGRSSFYCLEYFPSQMLRTGNNFEFSYQFEDVPFHSSYAHSQSLDRLMNPLIDQYLYYLSRTQSTGGTAGTQQLLFSQAGPNNMSAQAKNWLPGPCYRQQRVSTTLSQNNNSNFAWTGATKYHLNGRDSLVNPGVAMATHKDDEERFFPSSGVLMFGKQGAGKDNVDYSSVMLTSEEEIKTTNPVATEQYGVVADNLQQQNAAPIVGAVNSQGALPGMVWQNRDVYLQGPIWAKIPHTDGNFHPSPLMGGFGLKHPPPQILIKNTPVPADPPTTFSQAKPASFITQYSTGQVSVEIEWELQKENSKRWNPEIQYTSNYYKSTNVDFAVNTEGTYSEPRPIGTRYLTRNL

SEQ ID NO: 73 - DNA, 3128 bp, Artificial Sequence
  Synthetic polynucleotide
gaattcgccctttctacggctgcgtcaactggaccaatgagaactttcccttcaacgattgcgtcgacaagatggtgatctggtgggaggagggcaagatgacggccaaggtcgtggagtccgccaaggccattctcggcggcagcaaggtgcgcgtggaccaaaagtgcaagtcttccgcccagatcgatcccacccccgtgatcgtcacttccaacaccaacatgtgcgccgtgattgacgggaacagcaccaccttcgagcaccagcagccgttacaagaccggatgttcaaatttgaactcacccgccgtctggagcacgactttggcaaggtgacaaagcaggaagtcaaagagttcttccgctgggcgcaggatcacgtgaccgaggtggcgcatgagttctacgtcagaaagggtggagccaacaagagacccgcccccgatgacgcggataaaagcgagcccaagcgggcctgcccctcagtcgcggatccatcgacgtcagacgcggaaggagctccggtggactttgccgacaggtaccaaaacaaatgttctcgtcacgcgggcatgcttcagatgctgtttccctgcaagacatgcgagagaatgaatcagaatttcaacatttgcttcacgcacgggaccagagactgttcagaatgtttccccggcgtgtcagaatctcaaccggtcgtcagaaagaggacgtatcggaaactctgtgccattcatcatctgctagggcgggctcccgagattgcttgctcggcctgcgatctggtcaacgtggacctggatgactgtgtttctgagcaataaatgacttaaaccaggtatggctgccgatggttatcttccagattggctcgaggacaacctctctgagggcattcgcgagtggtgggacttgaaacctggagccccgaaacccaaagccaaccagcaaaagcaggacgacggccggggtctggtgcttcctggctacaagtacctcggacccttcaacggactcgacaagggggagcccgtcaacgcggcggacgcagcggccctcgagcacgacaaggcctacgaccagcagctcaaagcgggtgacaatccgtacctgcggtataaccacgccgacgccgagtttcaggagcgtctgcaagaagatacgtcttttgggggcaacctcgggcgagcagtcttccaggccaagaagcgggttctcgaacctctcggtctggttgaggaaggcgctaagacggctcctggaaagaagagaccggtagagccatcaccccagcgttctccagactcctctacgggcatcggcaagacaggccagcagcccgcgaaaaagagactcaactttgggcagactggcgactcagagtcagtgcccgaccctcaaccaatcggagaaccccccgcaggcccctctggtctgggatctggtacaatggctgcaggcggtggcgctccaatggcagacaataacgaaggcgccgacggagtgggtagttcctcaggaaattggcattgcgattccacatggctgggcgacagagtcatcaccaccagcacccgaacctgggccctccccacctacaacaaccacctctacaagcaaatctccaacgggacatcgggaggaagcaccaacgacaacacctacttcggctacagcaccccctgggggtattttgactttaacagattccactgccacttctcaccacgtgactggcagcgactcatcaacaacaactggggattccggcccaagagactcaacttcaagctcttcaacatccaggtcaaggaggtcacgcagaatgaaggcaccaagaccatcgccaataaccttaccagcacgattcaggtctttacggactcggaataccagctcccgtacgtcctcggctctgcgcaccagggctgcctgcctccgttcccggcggacgtcttcatgattcctcagtacgggtacctgactctgaacaacggcagtcaggccgtgggccgttcctccttctactgcctggagtactttccttctcaaatgctgagaacgggcaacaactttgagttcagctaccagtttgaggacgtgccttttcacagcagctacgcgcacagccaaagcctggaccggctgatgaaccccctcatcgaccagtacctgtactacctgtctcggactcagtccacgggaggtaccgcaggaactcagcagttgctattttctcaggccgggcctaataacatgtcggctcaggccaaaaactggctacccgggccctgctaccggcagcaacgcgtctccacgacactgtcgcaaaataacaacagcaactttgcttggaccggtgccaccaagtatcatctgaatggcagagactctctggtaaatcccggtgtcgctatggcaacgcacaaggacgacgaagagcgattttttccatccagcggagtcttgatgtttgggaaacagggagctggaaaagacaacgtggactatagcagcgttatgctaaccagtgaggaagaaatcaaaaccaccaacccagtggccacagaacagtacggcgtggtggccgataacctgcaacagcaaaacgccgctcctattgtaggggccgtcaacagtcaaggagccttacctggcatggtctggcagaaccgggacgtgtacctgcagggtcctatctgggccaagattcctcacacggacggcaactttcatccttcgccgctgatgggaggctttggactgaaacacccgcctcctcagatcctgattaagaatacacctgttcccgcggatcctccaactaccttcagtcaagccaagctggcgtcgttcatcacgcagtacagcaccggacaggtcagcgtggaaattgaatgggagctgcagaaagagaacagcaagcgctggaacccagagattcagtatacttccaactactacaaatctacaaatgtggactttgctgtcaatactgagggtacttattcagagcctcgccccattggcacccgttacctcacccgtaacctgtaattgcctgttaatcaataaaccggctaattcgtttcagttgaactttggtctctgcgaagggcgaattc

SEQ ID NO: 74 - protein, 738 aa, Artificial Sequence
  Synthetic polypeptide
MAADGYLPDWLEDNLSEGIREWWDLKPGAPKPKANQQKQDDGRGLVLPGYKYLGPFNGLDKGEPVNAADAAALEHDKAYDQQLKAGDNPYLRYNHADAEFQERLQEDTSFGGNLGRAVFQAKKRVLEPLGLVEEGAKTAPGKKRPVEPSPQRSPDSSTGIGKTGQQPAKKRLNFGQTGDSESVPDPQPIGEPPAGPSGLGSGTMAAGGGAPMADNNEGADGVGSSSGNWHCDSTWLGDRVITTSTRTWALPTYNNHLYKQISNGTSGGSTNDNTYFGYSTPWGYFDFNRFHCHFSPRDWQRLINNNWGFRPKRLNFKLFNIQVKEVTQNEGTKTIANNLTSTIQVFTDSEYQLPYVLGSAHQGCLPPFPADVFMIPQYGYLTLNNGSQAVGRSSFYCLEYFPSQMLRTGNNFEFSYQFEDVPFHSSYAHSQSLDRLMNPLIDQYLYYLSRTQSTGGTAGTQQLLFSQAGPNNMSAQAKNWLPGPCYRQQRVSTTLSQNNNSNFAWTGATKYHLNGRDSLVNPGVAMATHKDDEERFFPSSGVLMFGKQGAGKDNVDYSSVMLTSEEEIKTTNPVATEQYGVVADNLQQQNAAPIVGAVNSQGALPGMVWQNRDVYLQGPIWAKIPHTDGNFHPSPLMGGFGLKHPPPQILIKNTPVPADPPTTFSQAKLASFITQYSTGQVSVEIEWELQKENSKRWNPEIQYTSNYYKSTNVDFAVNTEGTYSEPRPIGTRYLTRNL

SEQ ID NO: 75 - DNA, 3084 bp, Artificial Sequence
  Synthetic polynucleotide
gaattcgccctttctacggctgcatcaactggaccaatgagaactttcccttcaacgattgcgtcgacaagatggtgatctggtgggaggagggcaagatgacggccaaggtcgtggagtccgccaaggccattctcggcggcagcaaggtgcgcgtggaccaaaagtgcaagtcgtccgcccagatcgaccccacccccgtgatcgtcacctccaacaccaacatgtgcgccgtgattgacgggaacagcaccaccttcgagcaccagcagccgttgcaggaccggatgttcaagttcgaactcacccgccgtctggagcacgactttggcaaggtgaccaagcaggaagtcaaagagttcttccgctgggcgcaggatcacgtgaccgaggtggcgcatgagttctacgtcagaaagggcggagccagcaaaagacccgcccccgatgacgcggatataagcgagcccaagcgggcctgcccctcagtcgcggatccatcgacgtcagacgcggaaggagctccggtggactttgccgacaggtaccaaaacaaatgttctcgtcacgcgggcatgcttcagatgctgtttccctgcaaaacgtgcgagaaaatgaatcagaatttcaacatttgcttcacgcacggggtcagagactgctcagaatgtttccccggtgcatcagaatctcaaccggtcgtcagaaaaaaaacgtatcagaaactgtgtgccattcatcatctgctggggcgggcacccgagattgcttgctcggcctgcgatctggtcaacgtggacctggacgactgtgtttctgagcaataaatgacttaaaccaggtatggctgccgatggttatcttccagattggcttgaggacaacctctctgagggcattcgcgagtggtgggacctgaaacctggagccccgaaacccaaagccaaccagcaaaagcaggacgacggccggggtctggtgcttcctggctacaagtacctcggacccttcaacggactcgacaagggggagcccgtcaacgcggcggacgcagcggccctcgagcacgacaaggcctacgaccagcagctcaaagcgggtgacaatccgtacctgcggtataaccacgccgacgccgagtttcaggagcgtctgcaagaagatacgtcttttgggggcaacctcgggcgagcagtcttccaggccaagaagcgggttctcgaacctctcggtctggttgaggaaggcgctaagacggctcctggaaagaagagaccggtagagccatcacctcagcgttcccccgactcctccacgggcatcggcaagaaaggccaccagcccgcgagaaagagactgaactttgggcagactggcgactcggagtcagtccccgaccctcaaccaatcggagaaccaccagcaggcccctctggtctgggatctggtacaatggctgcaggcggtggcgctccaatggcagacaataacgaaggcgccgacggagtgggtagttcctcaggaaattggcattgcgattccacatggctgggcgacagagtcatcaccaccagcacccgaacctgggccctgcccacctacaacaaccatctctacaagcaaatctccaacgggacatcgggaggaagcactaacgacaacacctactttggctacagcaccccctgggggtattttgacttcaacagattccactgccacttctcaccacgtgactggcagcgactcatcaacaataactggggattccggcccaagagactcaacttcaagctcttcaacatccaggtcaaggaggtcacgcagaatgaaggcaccaagaccatcgccaataaccttaccagcacgattcaggtgtttacggactcggaataccagctcccgtacgtccccggctctgcgcaccagggctgcctccctccgttcccggcggacgtcttcatgattcctcagtacgggtatctgaccctaaacaatggcagtcaggctgtgggccgttcctccttctactgcctggaatacttcccttctcaaatgctgaggacgggcaacaactttgaattcagctacaccttcgaggacgtgcctttccacagcagctacgcgcacagccagagcctggaccggctgatgaaccctctcatcgaccagtacctgtattacttatccagaactcagtccacaggaggaactcaaggtactcagcaattgttattttctcaagccgggcccgcaaacatgtcggctcaggccaagaactggctacctggaccgtgttaccgtcagcaacgagtttccacgacactgtcgcaaaacaacaacagcaattttgcttggaccggtgccaccaagtatcacctgaatggcagagactccctggttaatcccggcgttgccatggctacccacaaggacgacgaggagcgcttcttcccgtcaagcggagttctaatgtttggcaagcagggggctggaaaagacaatgtggactacagcagcgtgatgctcaccagcgaagaagaaattaaaactactaacccagtggctacagagcagtatggtgtggtggcagacaacctgcagcagaccaacggagctcccattgtgggaactgtcaacagccagggggccttacctggtatggtctggcaaaaccgggacgtgtacctgcagggccccatctgggccaaaattcctcacacggacggcaactttcatccttcgccgctgatgggaggctttggactgaaacacccgcctcctcagatcctggtgaaaaacactcctgttcctgcggatcctccgaccaccttcagccaggccaagctggcttcttttatcacgcagtacagcaccggacaggtcagcgtggaaatcgaatgggagctgcagaaagaaaacagcaagcgctggaacccagagattcagtatacttccaactactacaaatctacaaatgtggactttgctgtcaatactgagggtacttattcagagcctcgccccattggcactcgttatctcacccgtaatctgtaattgcttgttaatcaataaaccggt

SEQ ID NO: 76 - protein, 738 aa, Artificial Sequence
  Synthetic polypeptide
MAADGYLPDWLEDNLSEGIREWWDLKPGAPKPKANQQKQDDGRGLVLPGYKYLGPFNGLDKGEPVNAADAAALEHDKAYDQQLKAGDNPYLRYNHADAEFQERLQEDTSFGGNLGRAVFQAKKRVLEPLGLVEEGAKTAPGKKRPVEPSPQRSPDSSTGIGKKGHQPARKRLNFGQTGDSESVPDPQPIGEPPAGPSGLGSGTMAAGGGAPMADNNEGADGVGSSSGNWHCDSTWLGDRVITTSTRTWALPTYNNHLYKQISNGTSGGSTNDNTYFGYSTPWGYFDFNRFHCHFSPRDWQRLINNNWGFRPKRLNFKLFNIQVKEVTQNEGTKTIANNLTSTIQVFTDSEYQLPYVPGSAHQGCLPPFPADVFMIPQYGYLTLNNGSQAVGRSSFYCLEYFPSQMLRTGNNFEFSYTFEDVPFHSSYAHSQSLDRLMNPLIDQYLYYLSRTQSTGGTQGTQQLLFSQAGPANMSAQAKNWLPGPCYRQQRVSTTLSQNNNSNFAWTGATKYHLNGRDSLVNPGVAMATHKDDEERFFPSSGVLMFGKQGAGKDNVDYSSVMLTSEEEIKTTNPVATEQYGVVADNLQQTNGAPIVGTVNSQGALPGMVWQNRDVYLQGPIWAKIPHTDGNFHPSPLMGGFGLKHPPPQILVKNTPVPADPPTTFSQAKLASFITQYSTGQVSVEIEWELQKENSKRWNPEIQYTSNYYKSTNVDFAVNTEGTYSEPRPIGTRYLTRNL

SEQ ID NO: 77 - DNA, 3123 bp, Artificial Sequence
  Synthetic polynucleotide
gaattcgcccttggctgcgtcaactggaccaatgagaactttcccttcaacgattgcgtcgacaagatggtgatctggtgggaggagggcaagatgacggccaaggtcgtggagtccgccaaggccattctcggcggcagcaaggtgcgcgtggaccaaaagtgcaagtcgtccgcccagatcgaccccacccccgtgatcgtcacctccaacaccaacatgtgcgccgtgattgacgggaacagcaccaccttcgagcaccagcagccgttgcaggaccggatgttcaagttcgaactcacccgccgtctggagcacgactttggcaaggtgaccaagcaggaagtcaaagagttcttccgctgggcgcaggatcacgtgaccgaggtggcgcatgagttctacgtcagaaagggcggagccagcaaaagacccgcccccgatgacgcggatataagcgagcccaagcgggcctgcccctcagtcgcggatccatcgacgtcagacgcggaaggagctccggtggactttgccgacaggtaccaaaacaaatgttctcgtcacgcgggcatgctccagatgctgtttccctgcaaaacgtgcgagagaatgaatcagaatttcaacatttgcttcacgcacggggtcagagactgctcagaatgtttccccggtgcatcagaatctcaaccggtcgtcagaaaaaaaacgtatcagaaactgtgtgccattcatcatctgctggggcgggcacccgagattgcttgctcggcctgcgatctggtcaacgtggacctggacgactgtgtttctgagcaataaatgacttaaaccaggtatggctgccgatggttatcttccagattggcttgaggacaacctctctgagggcattcgcgagtggtgggacctgaaacctggagccccgaaacccaaagccaaccagcaaaagcaggacgacggccggggtctggtgcttcctggctacaagtacctcggacccttcaacggactcgacaagggggagcccgtcaacgcggcggacgcagcggccctcgagcacgacaaggcctacgaccagcagctcaaagcgggtgacaatccgtacctgcggtataaccacgccgacgccgagtttcaggagcgtctgcaagaagatacgtcttttgggggcaacctcgggcgagcagtcttccaggccaagaagcgggttctcgaacctctcggtctggttgaggaaggcgctaagacggctcctggaaagaagagaccggtagagccatcacctcagcgttcccccgactcctccacgggcatcggcaagaaaggccaccagcccgcgagaaagagactgaactttgggcagactggcgactcggagtcagtccccgaccctcaaccaatcggagaaccaccagcaggcccctctggtctgggatctggtacaatggctgcaggcggtggcgctccaatggcagacaataacgaaggcgccgacggagtgggtagttcctcaggaaattggcattgcgattccacatggctgggcgacagagtcatcaccaccagcacccgaacctgggccctgcccacctacaacaaccatctctacaagcaaatctccaacgggacatcgggaggaagcactaacgacaacacctactttggctacagcaccccctgggggtattttgacttcaacagattccactgccacttctcaccacgtgactggcagcgactcatcaacaataactggggattccggcccaagagactcaacttcaagctcttcaacatccaggtcaaggaggtcacgcagaatgaaggcaccaagaccatcgccaataaccttaccagcacgattcaggtgtttacggactcggaataccagctcccgtacgtcctcggctctgcgcaccagggctgcctccctccgttcccggcggacgtcttcatgattcctcagtacgggtatctgaccctaaacaatggcagtcaggctgtgggccgttcctccttctactgcctggaatacttcccttctcaaatgctgaggacgggcaacaactttgaattcagctacaccttcgaggacgtgcctttccacagcagctacgcgcacagccagagcctggaccggctgatgaaccctctcatcgaccagtacctgtattacttatccagaactcagtccacaggaggaactcaaggtactcagcaattgttattttctcaagccgggcccgcaaacatgtcggctcaggccaagaactggctacctggaccgtgttaccgtcagcaacgagtttccacgacactgtcgcaaaacaacaacagcaattttgcttggaccggtgccaccaagtatcacctgaatggcagagactccctggttaatcccggcgttgccatggctacccacaaggacgacgaggagcgcttcttcccgtcaagcggagttctaatgtttggcaagcagggggctggaaaagacaatgtggactacagcagcgtgatgctcaccagcgaagaagaaattaaaactactaacccagtggctacagagcagtatggtgtggtggcagacaacctgcagcagaccaacggagctcccattgtgggaactgtcaacagccagggggccttacctggtatggtctggcaaaaccgggacgtgtacctgcagggccccatctgggccaaaattcctcacacggacggcaactttcatccttcgccgctgatgggaggctttggactgaaacacccgcctcctcagatcctggtgaaaaacactcctgttcctgcggatcctccgaccaccttcagccaggccaagctggcttcttttatcacgcagtacagcaccggacaggtcagcgtggaaatcgaatgggagctgcagaaagaaaacagcaagcgctggaacccagagattcagtatacttccaactactacaaatctacaaatgtggactttgctgtcaatactgagggtacttattcagagcctcgccccattggcactcgttatctcacccgtaatctgtaattgcttgttaatcaataaaccggttaattcgtttcagttgaactttggtctctgcgaagggcgaattc

SEQ ID NO: 78 - protein, 738 aa, Artificial Sequence
  Synthetic polypeptide
MAADGYLPDWLEDNLSEGIREWWDLKPGAPKPKANQQKQDDGRGLVLPGYKYLGPFNGLDKGEPVNAADAAALEHDKAYDQQLKAGDNPYLRYNHADAEFQERLQEDTSFGGNLGRAVFQAKKRVLEPLGLVEEGAKTAPGKKRPVEPSPQRSPDSSTGIGKKGHQPARKRLNFGQTGDSESVPDPQPIGEPPAGPSGLGSGTMAAGGGAPMADNNEGADGVGSSSGNWHCDSTWLGDRVITTSTRTWALPTYNNHLYKQISNGTSGGSTNDNTYFGYSTPWGYFDFNRFHCHFSPRDWQRLINNNWGFRPKRLNFKLFNIQVKEVTQNEGTKTIANNLTSTIQVFTDSEYQLPYVLGSAHQGCLPPFPADVFMIPQYGYLTLNNGSQAVGRSSFYCLEYFPSQMLRTGNNFEFSYTFEDVPFHSSYAHSQSLDRLMNPLIDQYLYYLSRTQSTGGTQGTQQLLFSQAGPANMSAQAKNWLPGPCYRQQRVSTTLSQNNNSNFAWTGATKYHLNGRDSLVNPGVAMATHKDDEERFFPSSGVLMFGKQGAGKDNVDYSSVMLTSEEEIKTTNPVATEQYGVVADNLQQTNGAPIVGTVNSQGALPGMVWQNRDVYLQGPIWAKIPHTDGNFHPSPLMGGFGLKHPPPQILVKNTPVPADPPTTFSQAKLASFITQYSTGQVSVEIEWELQKENSKRWNPEIQYTSNYYKSTNVDFAVNTEGTYSEPRPIGTRYLTRNL

SEQ ID NO: 79 - DNA, 3122 bp, Artificial Sequence
  Synthetic polynucleotide
gaattcgccctttctacggctgcgtcaactggaccaatgagaactttcccttcaacgattgcgtcgacaagatggtgatctggtgggaggagggcaagatgacggccaaggtcgtggagtccgccaaggccattctcggcggcagcaaggtgcgtgtggaccaaaagtgcaagtcttccgcccagatcgatcccacccccgtgatcgtcacctccaacaccaacatgtgcgccgtgattgacgggaacagcgccaccttcgagcaccagcagccgttgcaggaccggatgttcaaatttgaactcacccgccgtctggagcatgactttggcaaggtgacgaagcaggaagtcaaagagttcttccgctgggcgcaggatcacgtgaccgaggtggcgcatgagttccacgtcagaaagggtggagccaacaagagacccgcccccgatgacgcggatataagcgagcccaagcgggcctgcccctcagtcgcggatccatcgacgtcagacgcggaaggagctccggtggactttgccgacaggtaccaaaacaaatgttctcgtcacgcgggcatgcttcagatgctgtttccctgcaagacatgcgagagaatgaatcagaatttcaacatttgcttcacgcacgggaccagagactgttcagaatgtttccccggcgtgtcagaatctcaaccggtcgtcagaaagaggacgtatcggaaactctgtgcgattcatcatctgctggggcgggctcccgagattgcttgctcggcctgcgatctggtcaacgtggacctggatgactgtgtttctgagcaataaatgacttaaaccaggtatggctgccgatggttatcttccagattggctcgaggacaacctctctgagggcattcgcgagtggtgggacttgaaacctggagccccgaaacccaaagccaaccagcaaaagcaggacgacggccggggtctggtgcttcctggctacaagtacctcggacccttcaacggactcgacaagggggagcccgtcaacgcggcggacgcagcggccctcgagcacgacaaagcctacgaccagcagctcaaagcgggtgacaatccgtacctgcggtataatcacgccgacgccgagtttcaggagcgtctgcaagaagatacgtcttttgggggcaacctcgggcgagcagtcttccaggccaagaagcgggttctcgaacctctcggtctggttgaggaaggcgctaagacggctcctggaaagaagagactggtagagcagtcgccacaagagccagactcctcctcgggcatcggcaagacaggccagcagcccgctaaaaagagactcaattttggtcagactggcgactcagagtcagtccccgacccacaacctctcggagaacctccagcagccccctcaggtctgggacctaatacaatggcttcaggcggtggcgctccaatggcagacaataacgaaggcgccgacggagtgggtaattcctcgggaaattggcattgcgattccacatggctgggggacagagtcatcaccaccagcacccgaacctgggccctgcccacctacaacaaccacctctacaagcaaatctccaacggcacctcgggaggaagcaccaacgacaacacctattttggctacagcaccccctgggggtattttgacttcaacagattccactgtcacttttcaccacgtgactggcaacgactcatcaacaacaattggggattccggcccaaaagactcaacttcaagctgttcaacatccaggtcaaggaagtcacgacgaacgaaggcaccaagaccatcgccaataatctcaccagcaccgtgcaggtctttacggactcggagtaccagttaccgtacgtgctaggatccgctcaccagggatgtctgcctccgttcccggcggacgtcttcacggttcctcagtacggctatttaactttaaacaatggaagccaagccctgggacgttcctccttctactgtctggagtatttcccatcgcagatgctgagaaccggcaacaactttcagttcagctacaccttcgaggacgtgcctttccacagcagctacgcgcacagccagagcctggacaggctgatgaatcccctcatcgaccagtacctgtactacctggtcagaacgcaaacgactggaactggagggacgcagactctggcattcagccaagcgggtcctagctcaatggccaaccaggctagaaattgggtgcccggaccttgctaccggcagcagcgcgtctccacgacaaccaaccagaacaacaacagcaactttgcctggacgggagctgccaagtttaagctgaacggccgagactctctaatgaatccgggcgtggcaatggcttcccacaaggatgacgacgaccgcttcttcccttcgagcggggtcctgatttttggcaagcaaggagccgggaacgatggagtggattacagccaagtgctgattacagatgaggaagaaatcaaggctaccaaccccgtggccacagaagaatatggagcagtggccatcaacaaccaggccgccaatacgcaggcgcagaccggactcgtgcacaaccagggggtgattcccggcatggtgtggcagaatagagacgtgtacctgcagggtcccatctgggccaaaattcctcacacggacggcaactttcacccgtctcccctgatgggcggctttggactgaagcacccgcctcctcaaattctcatcaagaacacaccggttccagcggacccgccgcttaccttcaaccaggccaagctgaactctttcatcacgcagtacagcaccggacaggtcagcgtggaaatcgagtgggagctgcagaaagaaaacagcaaacgctggaatccagagattcaatacacttccaactactacaaatctacaaatgtggactttgctgtcaacacggaaggagtttatagcgagcctcgccccattggcacccgttacctcacccgcaacctgtaattacatgttaatcaataaaccggttaattcgtttcagttgaactttggtctctgcgaagggcgaattc

SEQ ID NO: 80 - protein, 736 aa, Artificial Sequence
  Synthetic polypeptide
MAADGYLPDWLEDNLSEGIREWWDLKPGAPKPKANQQKQDDGRGLVLPGYKYLGPFNGLDKGEPVNAADAAALEHDKAYDQQLKAGDNPYLRYNHADAEFQERLQEDTSFGGNLGRAVFQAKKRVLEPLGLVEEGAKTAPGKKRLVEQSPQEPDSSSGIGKTGQQPAKKRLNFGQTGDSESVPDPQPLGEPPAAPSGLGPNTMASGGGAPMADNNEGADGVGNSSGNWHCDSTWLGDRVITTSTRTWALPTYNNHLYKQISNGTSGGSTNDNTYFGYSTPWGYFDFNRFHCHFSPRDWQRLINNNWGFRPKRLNFKLFNIQVKEVTTNEGTKTIANNLTSTVQVFTDSEYQLPYVLGSAHQGCLPPFPADVFTVPQYGYLTLNNGSQALGRSSFYCLEYFPSQMLRTGNNFQFSYTFEDVPFHSSYAHSQSLDRLMNPLIDQYLYYLVRTQTTGTGGTQTLAFSQAGPSSMANQARNWVPGPCYRQQRVSTTTNQNNNSNFAWTGAAKFKLNGRDSLMNPGVAMASHKDDDDRFFPSSGVLIFGKQGAGNDGVDYSQVLITDEEEIKATNPVATEEYGAVAINNQAANTQAQTGLVHNQGVIPGMVWQNRDVYLQGPIWAKIPHTDGNFHPSPLMGGFGLKHPPPQILIKNTPVPADPPLTFNQAKLNSFITQYSTGQVSVEIEWELQKENSKRWNPEIQYTSNYYKSTNVDFAVNTEGVYSEPRPIGTRYLTRNL

SEQ ID NO: 81 - DNA, 3117 bp, Artificial Sequence
  Synthetic polynucleotide
gaattcgcccttggctgcgtcaactggaccaatgagaactttcccttcaacgattgcgtcgacaagatggtgatctggtgggaggagggcaagatgacggccaaggtcgtggagtccgccaaggccattctcggcggcagcaaggtgcgtgtggaccaaaagtgcaagtcttccgcccagatcgatcccacccccgtgatcgtcacctccaacaccaacatgtgcgccgtgattgacgggaacagcaccaccttcgagcaccagcagccgttgcaggaccggatgttcaaatttgaactcacccgccgtctggagcatgactttggcaaggtgacgaagcaggaagtcaaagagttcttccgctgggcgcaggatcacgtgaccgaggtggcgcatgagttccacgtcagaaagggtggagccaacaagagacccgcccccgatgacgcggatataagcgagcccaagcgggcctgcccctcagtcgcggatccatcgacgtcagacgcggaaggagctccggtggactttgccgacaggtaccaaaacaaatgttctcgtcacgcgggcatgcttcagatgctgtttccctgcaagacatgcgagagaatgaatcagaatttcaacatttgcttcacgcacgggaccagagactgttcagaatgtttccccggcgtgtcagaatctcaaccggtcgtcagaaagaggacgtatcggaaactctgtgcgattcatcatctgctggggcgggctcccgagattgcttgctcggcctgcgatctggtcaacgtggacctggatgactgtgtttctgagcaataaatgacttaaaccaggtatggctgccgatggttatcttccagattggctcgaggacaacctctctgagggcattcgcgagtggtgggacttgaaacctggagccccgaaacccaaagccaaccagcaaaagcaggacgacggccggggtctggtgcttcctggctacaagtacctcggacccttcaacggactcgacaagggggagcccgtcaacgcggcggacgcagcggccctcgagcacgacaaagcctacgaccagcagctcaaagcgggtgacaatccgtacctgcggtataatcacgccgacgccgagtttcaggagcgtctgcaagaagatacgtcttttgggggcaacctcgggcgagcagtcttccaggccaagaagcgggttctcgaacctctcggtctggttgaggaaggcgctaagacggctcctggaaagaagagaccggtagagcagtcgccacaagagccagactcctcctcgggcatcggcaagacaggccagcagcccgctaaaaagagactcaattttggtcagactggcgactcagagtcagtccccgacccacaacctctcggagaacctccagcagccccctcaggtctgggacctaatacaatggcttcaggcggtggcgctccaatggcagacaataacgaaggcgccgacggagtgggtaattcctcgggaaattggcattgcgattccacatggctgggggacagagtcatcaccaccagcacccgaacctgggccctgcccacctacaacaaccacctctacaagcaaatctccaacggcacctcgggaggaagcaccaacgacaacacctattttggctacagcaccccctgggggtattttgacttcaacagattccactgtcacttttcaccacgtgactggcaacgactcatcaacaacaattggggattccggcccaaaagactcaacttcaagctgttcaacatccaggtcaaggaagtcacgacgaacgaaggcaccaagaccatcgccaataatctcaccagcaccgtgcgggtctttacggactcggagtaccagttaccgtacgtgctaggatccgctcaccagggatgtctgcctccgttcccggcggacgtcttcatggttcctcagtacggctatttaactttaaacaatggaagccaagccctgggacgttcctccttctactgtctggagtatttcccatcgcagatgctgagaaccggcaacaactttcagttcagctacaccttcgaggacgtgcctttccacagcagctacgcgcacagccagagcctggacaggctgatgaatcccctcatcgaccagtacctgtactacctggtcagaacgcaaacgactggaactggagggacgcagactctggcattcagccaagcgggtcctagctcaatggccaaccaggctagaaattgggtgcccggaccttgctaccggcagcagcgcgtctccacgacaaccaaccagagcaacaacagcaactttgcctggacgggagctgccaagtttaagctgaacggccgagactctctaatgaatccgggcgtggcaatggcttcccacaaggatgacgacgaccgcttcttcccttcgagcggggtcctgatttttggcaagcaaggagccgggaacgatggagtggattacagccaagtgctgattacagatgaggaagaaatcaaggctaccaaccccgtggccacagaagaatatggagcagtggccatcaacaaccaggccgccaatacgcaggcgcagaccggactcgtgcacaaccagggggtgattcccggcatggtgtggcagaatagagacgtgtacctgcagggtcccatctgggccaaaattcctcacacggacggcaactttcacccgtctcccctgatgggcggctttggactgaagcacccgcctcctcaaattctcatcaagaacacaccggttccagcggacccgccgcttaccttcaaccaggccaagctgaactctttcatcacgcagtacagcaccggacaggtcagcgtggaaatcgagtgggagctgcagaaagaaaacagcaaacgctggaatccagagattcaatacacttccaactactacaaatctacaaatgtggactttgctgtcaacacggaaggagtttatagcgagcctcgccccattggcacccgttacctcacccgcaacctgtaattacatgttaatcaataaaccggttaattcgtttcagttgaactttggtctctgcgaagggcgaattc

SEQ ID NO: 82 - protein, 736 aa, Artificial Sequence
  Synthetic polypeptide
MAADGYLPDWLEDNLSEGIREWWDLKPGAPKPKANQQKQDDGRGLVLPGYKYLGPFNGLDKGEPVNAADAAALEHDKAYDQQLKAGDNPYLRYNHADAEFQERLQEDTSFGGNLGRAVFQAKKRVLEPLGLVEEGAKTAPGKKRPVEQSPQEPDSSSGIGKTGQQPAKKRLNFGQTGDSESVPDPQPLGEPPAAPSGLGPNTMASGGGAPMADNNEGADGVGNSSGNWHCDSTWLGDRVITTSTRTWALPTYNNHLYKQISNGTSGGSTNDNTYFGYSTPWGYFDFNRFHCHFSPRDWQRLINNNWGFRPKRLNFKLFNIQVKEVTTNEGTKTIANNLTSTVRVFTDSEYQLPYVLGSAHQGCLPPFPADVFMVPQYGYLTLNNGSQALGRSSFYCLEYFPSQMLRTGNNFQFSYTFEDVPFHSSYAHSQSLDRLMNPLIDQYLYYLVRTQTTGTGGTQTLAFSQAGPSSMANQARNWVPGPCYRQQRVSTTTNQSNNSNFAWTGAAKFKLNGRDSLMNPGVAMASHKDDDDRFFPSSGVLIFGKQGAGNDGVDYSQVLITDEEEIKATNPVATEEYGAVAINNQAANTQAQTGLVHNQGVIPGMVWQNRDVYLQGPIWAKIPHTDGNFHPSPLMGGFGLKHPPPQILIKNTPVPADPPLTFNQAKLNSFITQYSTGQVSVEIEWELQKENSKRWNPEIQYTSNYYKSTNVDFAVNTEGVYSEPRPIGTRYLTRNL

SEQ ID NO: 83 - DNA, 3121 bp, Artificial Sequence
  Synthetic polynucleotide
gaattcgcccttctacggctgcgtcaactggaccaatgagaactttcccttcaacgattgcgtcgacaagatggtgatctggtgggaggagggcaagatgacggccaaggtcgtggagtccgccaaggccattctcggcggcagcaaggtgcgtgtggaccaaaagtgcaagtcttccgcccagatcgatcccacccccgtgatcgtcacctccaacaccaacatgtgcgccgtgattgacgggaacagcaccaccttcgagcaccagcagccgttgcaggaccggatgttcaaatttgaactcacccgccgtctggagcatgactttggcaaggtgacgaagcaggaagtcaaagagttcttccgctgggcgcaggatcacgtgaccgaggtggcgcatgagttccacgtcagaaagggtggcgccaacaagagacccgcccccgatgacgcggatataagcgagcccaagcgggcctgcccctcagtcgcggatccatcgacgtcagacgcggaaggagctccggtggactttgccgacaggtaccaaaacaaatgttctcgtcacgcgggcatgcttcagatgctgtttccctgcaagacatgcgagagaatgaatcagaatttcaacatttgcttcacgcacgggaccagagactgttcagaatgtttccccggcgtgtcagaatctcaaccggtcgtcagaaagaggacgtatcggaaactctgtgcgattcatcatctgctggggcgggctcccgagattgcttgctcggcctgcgatctggtcaacgtggacctggatgactgtgtttctgagcaataaatgacttaaaccaggtatggctgccgatggttatcttccagattggctcgaggacaacctctctgagggcattcgcgagtggtgggacttgaaacctggagccccgaaacccaaagccaaccagcaaaagcaggacgacggccggggtctggtgcttcctggctacaagtacctcggacccttcaacggactcgacaagggggagcccgtcaacgcggcggacgcagcggccctcgagcacgacaaagcctacgaccagcagctcaaagcgggtgacaatccgtacctgcggtataatcacgccgacgccgagtttcaggagcgtctgcaagaagatacgtcctttgggggcaacctcgggcgagcagtcttccaggccaagaagcgggttctcgaacctctcggtctggttgaggaaggcgctaagacggctcctggaaagaagagaccggtagagcagtcgccacaagagccagactcctcctcgggcatcggcaagacaggccagcagcccgctaaaaagagactcaattttggtcagactggcgactcagagtcagtccccgacccacaacctctcggagaacctccagcagccccctcaggtctgggacctaatacaatggcttcaggcggtggcgctccaatggcagacaataacgaaggcgccgacggagtgggtaattcctcgggaaattggcattgcgattccacatggctgggggacagagtcatcaccaccagcacccgaacctgggccctgcccacctacaacaaccacctctacaagcaaatctccaacggcacctcgggaggaagcaccaacgacaacacctattttggctacagcaccccctgggggtattttgacttcaacagattccactgtcacttttcaccacgtgactggcaacgactcatcaacaacaattggggattccggcccaaaagactcaacttcaagctgttcaacatccaggtcaaggaagtcacgacgaacgaaggcaccaagaccatcgccaataatctcaccagcaccgtgcaggtctttacggacttggagtaccagttaccgtacgtgctaggatccgctcaccagggatgtctgcctccgttcccggcggacgtcttcatggttcctcagtacggctatttaactttaaacaatggaagccaagccctgggacgttcctccttctactgtctggagtatttcccatcgcagatgccgagaaccggcaacaactttcagttcagctacaccttcgaggacgtgcctttccacagcagctacgcgcacagccagagcctggacaggctgatgaatcccctcatcgaccagtacctgtactacctggtcagaacgcaaacgactggaactggagggacgcagactctggcattcagccaagcgggtcctagctcaatggccaaccaggctagaaattgggtgcccggaccttgctaccggcagcagcgcgtctccacgacaaccaaccagaacaacaacagcaactttgcctggacgggagctgccaagtttaagctgaacggccgagactctctaatgaatccgggcgtggcaatggcttcccacaaggatgacgacgaccgcttcttcccttcgagcggggtcctgatttttggcaagcaaggagccgggaacgatggagtggattacagccaagtgctgattacagatgaggaagaaatcaaggctaccaaccccgtggccacagaagaatatggagcagtggccatcaacaaccaggccgccaatacgcaggcgcagaccggactcgtgcacaaccagggggtgattcccggcatggtgtggcagaatagagacgtgtacctgcagggtcccatctgggccaaaattcctcacacggacggcaactttcacccgtctcccctgatgggcggctttggactgaagcacccgcctcctcaaattctcatcaagaacacaccggttccagcggacccgccgcttaccttcaaccaggccaagctgaactctttcatcacgcagtacagcaccggacaggtcagcgtggaaatcgagtgggagctgcagaaagaaaacagcaaacgctggaatccagagattcaatacacttccaactactacaaatctacaaatgtggactttgctgtcaacacggaaggagtttatagcgagcctcgccccattggcacccgttacctcacccgcaacctgtaattacatgttaatcaataaaccggttaattcgtttcagttgaactttggtctctgcgaagggcgaattc

SEQ ID NO: 84 - protein, 736 aa, Artificial Sequence
  Synthetic polypeptide
MAADGYLPDWLEDNLSEGIREWWDLKPGAPKPKANQQKQDDGRGLVLPGYKYLGPFNGLDKGEPVNAADAAALEHDKAYDQQLKAGDNPYLRYNHADAEFQERLQEDTSFGGNLGRAVFQAKKRVLEPLGLVEEGAKTAPGKKRPVEQSPQEPDSSSGIGKTGQQPAKKRLNFGQTGDSESVPDPQPLGEPPAAPSGLGPNTMASGGGAPMADNNEGADGVGNSSGNWHCDSTWLGDRVITTSTRTWALPTYNNHLYKQISNGTSGGSTNDNTYFGYSTPWGYFDFNRFHCHFSPRDWQRLINNNWGFRPKRLNFKLFNIQVKEVTTNEGTKTIANNLTSTVQVFTDLEYQLPYVLGSAHQGCLPPFPADVFMVPQYGYLTLNNGSQALGRSSFYCLEYFPSQMPRTGNNFQFSYTFEDVPFHSSYAHSQSLDRLMNPLIDQYLYYLVRTQTTGTGGTQTLAFSQAGPSSMANQARNWVPGPCYRQQRVSTTTNQNNNSNFAWTGAAKFKLNGRDSLMNPGVAMASHKDDDDRFFPSSGVLIFGKQGAGNDGVDYSQVLITDEEEIKATNPVATEEYGAVAINNQAANTQAQTGLVHNQGVIPGMVWQNRDVYLQGPIWAKIPHTDGNFHPSPLMGGFGLKHPPPQILIKNTPVPADPPLTFNQAKLNSFITQYSTGQVSVEIEWELQKENSKRWNPEIQYTSNYYKSTNVDFAVNTEGVYSEPRPIGTRYLTRNL

SEQ ID NO: 85 - DNA, 3122 bp, Artificial Sequence
  Synthetic polynucleotide
gaattcgccctttctacggctgcgtcaactggaccaatgagaactttcccttcaacgattgcgtcgacaagatggtgatctggtgggaggagggcaagatgacggccaaggtcgtggagtccgccaaggccattctcggcggcagcaaggtgcgtgtggaccaaaagtgcaagtcttccgcccagatcgatcccacccccgtgatcgtcacctccaacaccaacatgtgcgccgtgattgacgggaacagcaccaccttcgagcaccagcagccgttgcaggaccggatgttcaaatttgaactcacccgccgtctggagcatgactttggcaaggtgacgaagcaggaagtcaaagggttcttccgctgggcgcaggatcacgtgaccgaggtggcgcatgagttccacgtgcgagcccaagcgggcctgcccctcagtcgcggatccatcgacgtcagaccagaaagggtggagccaacaagagacccgcccccgatgacgcggatataagcggaaggagctccggtggactttgccgacaggtaccaaaacaaatgttctcgtcacgcgggcatgcttcagatgctgtttccctgcaagacatgcgagagaatgaatcagaatttcaacatttgcttcacgcacgggaccagagactgttcagaatgtttccccggcgtgtcagaatctcaaccggtcgtcagaaagaggacgtatcggaaactctgtgcgattcatcatctgctggggcgggctcccgagattgcttgctcggcctgcgatctggtcaacgtggacctggatgactgtgtttctgagcaataaatgacttaaaccaggtatggctgccgatggttatcttccagattggctcgaggacaacctctctgagggcattcgcgagtggtgggacttgaaacctggagccccgaaacccaaagccaaccagcaaaagcaggacgacggccggggtctggtgcttcctggctacaagtacctcggacccttcaacggactcgacaagggggagcccgtcaacgcggcggacgcagcggccctcgagcacgacaaagcctacgaccagcagctcaaagcgggtgacaatccgtacctgcggtataatcacgccgacgccgagtttcaggagcgtctgcaagaagatacgtcttttgggggcaacctcgggcgagcagtcttccaggccaagaagcgggttctcgaacctctcggtctggttgaggaaggcgctaagacggctcctggaaagaagagaccggtagagcagtcgccacaagagccagactcctcctcgggcatcggcaagacaggccagcagcccgctaaaaagagactcaattttggtcagactggcgactcagagtcagtccccgacccacaacctctcggagaacctccagcagccccctcaggtctgggacctaatacaatggcttcaggcggtggcgctccaatggcagacaataacgaaggcgccgacggagtgggtaattcctcgggaaattggcattgcgattccacatggctgggggacagagtcatcaccaccagcacccgaacctgggccctgcccacctacaacaaccacctctacaagcaaatctccaacggcacctcgggaggaagcaccaacgacaacacctattttggctacagcaccccctgggggtattttgacttcaacagattccactgtcacttttcaccacgtgactggcaacgactcatcaacaacaattggggattccggcccaaaagactcaacttcaagctgttcaacatccaggtcaaggaagtcacgacgaacgaaggcaccaagaccatcgccaataatctcaccagcaccgtgcaggtctttacggactcggagtaccagttaccgtacgtgctaggatccgctcaccagggatgtctgcctccgttcccggcggacgtcttcatggttcctcagtacggctatttaactttaaacaatggaagccaagccctgggacgttcctccttctactgtctggagtatttcccatcgcagatgctgagaaccggcaacaactttcagttcagctacaccttcgaggacgtgcctttccacagcagctacgcgcacagccagagcctggacaggctgatgaatcccctcatcgaccagtacctgtactacctggtcagaacgcaaacgactggaactggagggacgcagactctggcattcagccaagcgggtcctagctcaatggccaaccaggctagaaattgggtgcccggaccttgctaccggcagcagcgcgtctccacgacaaccaaccagaacaacaacagcaactttgcctggacgggagctgccaagtttaagctgaacggccgagactctctaatgaatccgggcgtggcaatggcttcccacaaggatgacgacgaccgcttcttcccttcgagcggggtcctgatttttggcaagcaaggagccgggaacgatggagtggattacagccaagtgctgattacagatgaggaagaaatcaaggctaccaaccccgtggccacagaagaatatggagcagtggccatcaacaaccaggccgccaatacgcaggcgcagaccggactcgtgcacaaccagggggtgattcccggcatggtgtggcagaatagagacgtgtacctgcagggtcccatctgggccaaaattcctcacacggacggcaactttcacccgtctcccctgatgggcggctttggactgaagcacccgcctcctcaaattctcatcaagaacacaccggttccagcggacccgccgcttaccttcaaccaggccaagctgaactctttcatcacgcagtacagcaccggacaggtcagcgtggaaatcgagtgggagctgcagaaagaaaacagcaaacgctggaatccagagattcaatacacttccaactactacaaatctacaaatgtggactttgctgtcaacacggagggggtttatagcgagcctcgccccattggcacccgttacctcacccgcaacctgtaattacatgttaatcaataaaccggttaattcgtttcagttgaactttggtctctgcgaagggcgaattc

SEQ ID NO: 86 - protein, 736 aa, Artificial Sequence
  Synthetic polypeptide
MAADGYLPDWLEDNLSEGIREWWDLKPGAPKPKANQQKQDDGRGLVLPGYKYLGPFNGLDKGEPVNAADAAALEHDKAYDQQLKAGDNPYLRYNHADAEFQERLQEDTSFGGNLGRAVFQAKKRVLEPLGLVEEGAKTAPGKKRPVEQSPQEPDSSSGIGKTGQQPAKKRLNFGQTGDSESVPDPQPLGEPPAAPSGLGPNTMASGGGAPMADNNEGADGVGNSSGNWHCDSTWLGDRVITTSTRTWALPTYNNHLYKQISNGTSGGSTNDNTYFGYSTPWGYFDFNRFHCHFSPRDWQRLINNNWGFRPKRLNFKLFNIQVKEVTTNEGTKTIANNLTSTVQVFTDSEYQLPYVLGSAHQGCLPPFPADVFMVPQYGYLTLNNGSQALGRSSFYCLEYFPSQMLRTGNNFQFSYTFEDVPFHSSYAHSQSLDRLMNPLIDQYLYYLVRTQTTGTGGTQTLAFSQAGPSSMANQARNWVPGPCYRQQRVSTTTNQNNNSNFAWTGAAKFKLNGRDSLMNPGVAMASHKDDDDRFFPSSGVLIFGKQGAGNDGVDYSQVLITDEEEIKATNPVATEEYGAVAINNQAANTQAQTGLVHNQGVIPGMVWQNRDVYLQGPIWAKIPHTDGNFHPSPLMGGFGLKHPPPQILIKNTPVPADPPLTFNQAKLNSFITQYSTGQVSVEIEWELQKENSKRWNPEIQYTSNYYKSTNVDFAVNTEGVYSEPRPIGTRYLTRNL

SEQ ID NO: 87 - DNA, 2370 bp, Artificial Sequence
  Synthetic polynucleotide
gaattcgccctttctacggctgcgtcaactggaccaatgagaactttcccttcaacgattgcgtcgacaagatggtgatctggtgggaggagggcaagatgacggccaaggtcgtggagtccgccaaggccattctcggcggcagcaaggtgcgcgtggaccaaaagtgcaagtcgtccgcccagatcgaccccacccccgtgatcgtcacctccaacaccaacatgtgcgccgtgattgacgggaacagcaccaccttcgagcaccagcagccgttgcaggaccggatgttcaagttcgaactcacccgccgtctggagcacgactttggcaaggtgaccaagcaggaagtcaaagagttcttccgctgggcgcaggatcacgtgaccgaggtggcgcatgagttctacgtcagaaagggcggagccagcaaaagacccgcccccgatgacgcggatataagcgagcccaagcgggcctgcccctcagtcgcggatccatcgacgtcagacgcggaaggagctccggtggactttgccgacaggtaccaaaacaaatgttctcgtcacgcgggcatgcttcagacgctgtttccctgcaaaacgtgcgagagaatgaatcagaatttcaacatttgcttcacgcacggggtcagagactgctcagaatgtttccccggtgcatcagaatctcaaccggtcgtcagaaaaaaaacgtatcagaaactgtgtgccattcatcatctgctggggcgggcacccgagattgcttgctcggcctgcgatctggtcaacgtggacctggacgactgtgtttctgagcaataaatgacttaaaccaggtatggctgccgatggttatcttccagattggcttgaggacaacctctctgagggcattcgcgagtggtgggacctgaaacctggagccccgaaacccaaagccaaccagcaaaagcaggacgacggccggggtctggtgcttcctggctacaagtacctcggacccttcaacggactcgacaagggggagcccgtcaacgcggcggacgcagcggccctcgagcacgacaaggcctacgaccagcagctcaaagcgggtgacaatccgtacctgcggtataaccacgccgacgccgagtttcaggagcgtctgcaagaagatacgtcttttgggggcaacctcgggcgagcagtcttccaggccaagaagcgggttctcgaacctctcggtctggttgaggaaggcgctaagacggctcctggaaagaagagaccggtagagccatcacctcagcgttcccccgactcctccacgggcatcggcaagaaaggccaccagcccgcgagaaagagactgaactttgggcagactggcgactcggagtcagtccccgaccctcaaccaatcggagaaccaccagcaggcccctctggtctgggatctggtacaatggctgcaggcggtggcgctccaatggcagacaataacgaaggcgccgacggagtgggtagttcctcaggaaattggcattgcgattccacatggctgggcgacagagtcatcaccaccagcacccgaacctgggccctgcccacctacaacaaccatctctacaagcaaatctccaacgggacatcgggaggaagcactaacgacaacacctactttggctacagcaccccctgggggtattttgacttcaacagattccactgccacttctcaccacgtgactggcagcgactcatcaacaataactggggattccggcccaagagactcaacttcaagctcttcaacatccaggtcaaggaggtcacgcagaatgaaggcaccaagaccatcgccaataaccttaccagcacgattcaggtgtttacggactcggaataccagctcccgtacgtcctcggctctgcgcaccagggctgcctccctccgttcccggcggacgtcttcatgattcctcagtacgggtatctgaccctaaacaatggcagtcaggctgtgggccgttcctccttctactgcctggaatacttcccttctcaaatgctgaggacgggcaacaactttgaattcagctacaccttcgaggacgtgcctttccacagcagctacgcgcacagccagagcctggaccggctgatgaaccctctcatcgaccagtacctgtattacttatccagaactcagtccacaggaggaactcaaggtactcagcaattgttattttctcaagccgggcccgcaaacatgtyggctcaggccaagaactggctacctggaccgtgttaccgtcagcaacgagtttccacgacactgtcgcaaaacaacaacagcaattttgctggaccggtgccacca

SEQ ID NO: 88 - protein, 738 aa, Artificial Sequence; identical to SEQ ID NO: 78
  Synthetic polypeptide

SEQ ID NO: 89 - DNA, 2205 bp, Artificial Sequence
  Synthetic polynucleotide
atgactgacggttaccttccagattggctagaggacaacctctctgaaggcgttcgagagtggtgggcgctgcaacctggagcccctaaacccaaggcaaatcaacaacatcaggacaacgctcggggtcttgtgcttccgggttacaaatacctcggacccggcaacggactcgacaagggggaacccgtcaacgcagcggacgcggcagccctcgagcacgacaaggcctacgaccagcagctcaaggccggtgacaacccctacctcaagtacaaccacgccgacgcggagttccagcagcggcttcagggcgacacatcgtttgggggcaacctcggcagagcagtcttccaggccaaaaagagggttcttgaacctcttggtctggttgagcaagcgggtgagacggctcctggaaagaagagaccgttgattgaatccccccagcagcccgactcctccacgggtatcggcaaaaaaggcaagcagccggctaaaaagaagctcgttttcgaagacgaaactggagcaggcgacggaccccctgagggatcaacttccggagccatgtctgatgacagtgagatgcgtgcagcagctggcggagctgcagtcgagggcggacaaggtgccgatggagtgggtaatgcctcgggtgattggcattgcgattccacctggtctgagggccacgtcacgaccaccagcaccagaacctgggtcttgcccacctacaacaaccacctctacaagcgactcggagagagcctgcagtccaacacctacaacggattctccaccccctggggatactttgacttcaaccgcttccactgccacttctcaccacgtgactggcagcgactcatcaacaacaactggggcatgcgacccaaagccatgcgggtcaaaatcttcaacatccaggtcaaggaggtcacgacgtcgaacggcgagacaacggtggctaataaccttaccagcacggttcagatctttgcggactcgtcgtacgaactgccgtacgtgatggatgcgggtcaagagggcagcctgcctccttttcccaacgacgtctttatggtgccccagtacggctactgtggactggtgaccggcaacacttcgcagcaacagactgacagaaatgccttctactgcctggagtactttccttcgcagatgctgcggactggcaacaactttgaaattacgtacagttttgagaaggtgcctttccactcgatgtacgcgcacagccagagcctggaccggctgatgaaccctctcatcgaccagtacctgtggggactgcaatcgaccaccaccggaaccaccctgaatgccgggactgccaccaccaactttaccaagctgcggcctaccaacttttccaactttaaaaagaactggctgcccgggccttcaatcaagcagcagggcttctcaaagactgccaatcaaaactacaagatccctgccaccgggtcagacagtctcatcaaatacgagacgcacagcactctggacggaagatggagtgccctgacccccggacctccaatggccacggctggacctgcggacagcaagttcagcaacagccagctcatctttgcggggcctaaacagaacggcaacacggccaccgtacccgggactctgatcttcacctctgaggaggagctggcagccaccaacgccaccgatacggacatgtggggcaacctacctggcggtgaccagagcaacagcaacctgccgaccgtggacagactgacagccttgggagccgtgcctggaatggtctggcaaaacagagacatttactaccagggtcccatttgggccaagattcctcataccgatggacactttcacccctcaccgctgattggtgggtttgggctgaaacacccgcctcctcaaatttttatcaagaacaccccggtacctgcgaatcctgcaacgaccttcagctctactccggtaaactccttcattactcagtacagcactggccaggtgtcggtgcagattgactgggagatccagaaggagcggtccaaacgctggaaccccgaggtccagtttacctccaactacggacagcaaaactctctgttgtgggctcccgatgcggctgggaaatacactgagcctagggctatcggtacccgctacctcacccaccacctgtaa

SEQ ID NO: 90 - protein, 734 aa, Artificial Sequence; identical to SEQ ID NO: 62
  Synthetic polypeptide

SEQ ID NO: 91 - DNA, 3128 bp, Artificial Sequence
  Synthetic polynucleotide
gaattcgccctttctacggctgcgtcaactggaccaatgagaactttcccttcaacgattgcgtcgacaagatgttgatctggtgggaggagggcaagatgacggccaaggtcgtggagtccgccaaggccattctcggcggcagcaaagtgcgcgtggaccaaaagtgcaagccgtccgcccagatcgaccccacccccgtgatcgtcacctccaacaccaacatgtgcgccgtgattgacgggaacagcaccaccttcgagcaccagcagccgttgcgggaccggatgttcaagtttgaactcacccgccgtctggagcacgactttggcaaggtgacaaagcaggaagtcagagagttcttccgctgggcgcaggatcacgtgaccgaggtggcgcacgagttctacgtcagaaagggtggagccaacaagagacccgcccccgatgacgcggataaaagcgagcccaagcgggcctgcccctcagtcgcggatccatcgacgtcagacgcggaaggagctccggtggactttgccgacaggtaccaaaacaaatgttctcgtcacgcgggcatgcttcagatgctgtttccctgcaaaacatgcgagagaatgaatcagaatttcaacatttgcttcacgcacgggaccagagactgttcagaatgtttccccggcgtgtcagaatctcaaccggtcgtcagaaaaaagacgtatcggaaactctgtgcgattcatcatctgctggggcgggcacccgagattgcttgctcggcctgcgatctggtcaacgtggacctagatgactgtgtttctgagcaataaatgacttaaaccaggtatggctgccgatggttatcttccagattggctcgaggacaacctctctgagggcattcgcgagtggtgggacttgaaacctggagccccgaaacccaaagccaaccagcaaaagcaggacgacggccggggtctggtgcttcctggctacaagtacctcggacccttcaacggactcgacaagggggagcccgtcaacgcggcggacgcagcggccctcgagcacgacaaggcctacgaccagcagctcaaagcgggtgacaatccgtacctgcggtataaccacgccgacgccgagtttcaggagcgtctgcaagaagatacgtcttttgggggcaacctcgggcgagcagtcttccaggccaagaagcgggttctcgaacctctcggtctggttgaggaaggcgctaagacggctcctggaaagaagagaccggtagagccatcaccccagcgttctccagactcctctacgggcatcggcaagaaaggccagcagcccgcgaaaaagagactcaactttgggcagactggcgactcagagtcagtgcccgaccctcaaccaatcggagaaccccccgcaggcccctctggtctgggatctggtacaatggctgcaggcggtggcgctccaatggcagacaataacgaaggcgccgacggagtgggtagttcctcaggaaattggcattgcgattccacatggctgggcgacagagtcatcaccaccagcacccgaacctgggccctccccacctacaacaaccacctctacaagcaaatctccaacgggacttcgggaggaagcaccaacgacaacacctacttcggctacagcaccccctgggggtattttgactttaacagattccactgccacttctcaccacgtgactggcagcgactcatcaacaacaactggggattccggcccaagagactcaacttcaagctcttcaacatccaggtcaaggaggtcacgcagaatgaaggcaccaagaccatcgccaataaccttaccagcacgattcaggtctttacggactcggaataccagctcccgtacgtcctcggctctgcgcaccagggctgcctgcctccgttcccggcggacgtcttcatgattcctcagtacgggtacctgactctgaacaatggcagtcaggccgtgggccgttcctccttctactgcctggagtactttccttctcaaatgctgagaacgggcaacaactttgagttcagctaccagtttgaggacgtgccttttcacagcagctacgcgcacagccaaagcctggaccggctgatgaaccccctcatcgaccagtacctgtactacctgtctcggactcagtccacgggaggtaccgcaggaactcagcagttgctattttctcaggccgggcctaataacatgtcggctcaggccaaaaactggctacccgggccctgctaccggcagcaacgcgtctccacgacactgtcgcaaaataacaacagcaactgtaaatcccggtgtcgctatggcaacccacaaggacgacgaagagcgattttgcctggaccggtgccaccaagtatcatctgaatggcagagactctctgttttccgtccagcggagtcttaatgtttgggaaacagggagctggaaaagacaacgtggactatagcagcgttatgctaaccagtgaggaagaaattaaaaccaccaacccagtggccacggaacagtacggcgtggtggccgataacctgcaacagcaaaacgccgctcctattgtaggggccgtcaacagtcaaggagccttacctggcatggtctggcagaaccgggacgtgtacctgcagggtcctatctgggccaagattcctcacacggacggaaactttcatccctcgccgctgatgggaggctttggactgaaacacccgcctcctcagatcctgattaagaatacacctgttcccgcggatcctccaactaccttcagtcaagctaagctggcgtcgttcatcacgcagtacagcaccggacaggtcagcgtggaaattgaatgggagctgcagaaagaaaacagcaaacgctggaacccagagattcaatacacttccaactactacaaatctacaaatgtggacttcgctgttaacacagatggcacttattctgagcctcgccccattggcacccgttacctcacccgtaatctgtaattgctcgttaatcaataaaccggttgattcgtttcagttgaactttggtctctgcgaagggcgaattc

SEQ ID NO: 92 - protein, 738 aa, Artificial Sequence; identical to SEQ ID NO: 12
  Synthetic polypeptide

SEQ ID NO: 93 - DNA, 3128 bp, Artificial Sequence
  Synthetic polynucleotide
gaattcgccctttctacggctgcgtcaactggaccaatgagaactttcccttcaacgattgcgtcgacaagatggtgatctggtgggaggagggcaagatgacggccaaggtcgtggagtccgccaaggccattctcggcggcagcaaagtgcgcgtggaccaaaagtgcaagtcgtccgcccagatcgaccccacccccgtgatcgtcacctccaacaccaacatgtgcgccgtgattgacgggaacagcaccaccttcgagcaccagcagccgttgcaggaccggatgttcaagtttgaactcacccgccgtctggagcacgactttggcaaggtgacaaagcaggaagtcagagagttcttccgctgggcgcaggatcacgtgaccgaggtggcgcacgagttctacgtcagaaagggtggagccaacaagagacccgcccccgatgacgcggataaaagcgagcccaagcgggcctgcccctcagtcgcggatccatcgacgtcagacgcggaaggagctccggtggactttgccgacaggtaccaaaacaaatgttctcgtcacgcgggcatgcttcagatgctgtttccctgcaaaacatgcgagagaatgaatcagaatttcaacatttgcttcacgcacgggaccagagactgttcagaatgtttccccggcgtgtcagaatctcaaccggttgtcagaaaaaagacgtatcggaaactctgtgcgattcatcatctgctggggcgggcacccgagattgcttgctcggcctgcgatctggtcaacgtggacctagatgactgtgtttctgagcaataaatgacttaaaccaggtatggctgccgatggttatcttccagattggctcgaggacaacctctctgagggcattcgcgagtggtgggacttgaaacctggagccccgaaacccaaagccaaccagcaaaagcaggacgacggccggggtctggtgcttcctggctacaagtacctcggacccttcaacggactcgacaagggggagcccgtcaacgcggcggacgcagcggccctcgagcacgacaaggcctacgaccagcagctcaaagcgggtgacaatccgtacctgcggtataaccacgccgacgccgagtttcaggagcgtctgcaagaagatacgtcttttgggggcaacctcgggcgagcagtcttccaggccaagaagcgggttctcgaacctctcggtctggttgaggaaggcgctaagacggctcctggaaagaagagaccggtagagccatcaccccagcgttctccagactcctctacgggcatcggcaagaaaggccagcagcccgcgaaaaagagactcaactttgggcagactggcgactcagagtcagtgcccgaccctcaaccaatcggagaaccccccgcaggcccctctggtctgggatctggtacaatggctgcaggcggtggcgctccaatggcagacaataacgaaggcgccgacggagtgggtagttcctcaggaaattggcattgcgattccacatggctgggcgacagagtcatcaccaccagcacccgaacctgggccctccccacctacaacaaccacctctacaagcaaatctccaacgggacttcgggaggaagcaccaacgacaacacctacttcggctacagcaccccctgggggtattttgactttaacagattccactgccacttctcaccacgtgactggcagcgactcatcaacaacaactggggattccggcccaagagacccaacttcaagctcttcaacatccaggtcaaggaggtcacgcagaatgaaggcaccaagaccatcgccaataaccttaccagcacgattcaggtctttacggactcggaataccagctcccgtacgtcctcggctctgcgcaccagggctgcctgcctccgttcccggcggacgtcttcatgattcctcagtacgggtacctgactctgaacaatggcagtcaggccgtgggccgttcctccttctactgcctggagtactttccttctcaaatgctgagaacgggcaacaactttgagttcagctaccagtttgaggacgtgccttttcacagcagctacgcgcacagccaaagcctggaccggctgatgaaccccctcatcgaccagtacctgtactacctgtctcggactcagtccacgggaggtaccgcaggaactcagcagttgctattttctcaggccgggcctaataacatgtcggctcaggccaaaaactggctacccgggccctgctaccggcagcaacgcgtctccacgacactgtcgcaaaataacaacagcaactttgcctggaccggtgccaccaagtatcatctgaatggcagagactctctggtaaatcccggtgtcgctatggcaacccacaaggacgacgaagagcgattttttccgtccagcggagtcttaatgtttgggaaacagggagctggaaaagacaacgtggactatagcagcgttatgctaaccagtgaggaagaaattaaaaccaccaacccagtggccacagaacagtacggcgtggtggccgataacctgcaacagcaaaacgccgctcctattgtaggggccgtcaacagtcaaggagccttacctggcatggtctggcagaaccgggacgtgtacctgcagggtcctatctgggccaagattcctcacacggacggaaactttcatccctcgccgctgatgggaggctttggactgaaacacccgcctcctcagatcctgattaagaatacacctgttcccgcggatcctccaactaccttcagtcaagctaagctggcgtcgttcatcacgcagtacagcaccggacaggtcagcgtggaaattgaatgggagctgcagaaagaaaacagcaaacgctggaacccagagattcaatacacttccaactactacaaatctacaaatgtggactttgctgttaacacagatggcacttattctgagcctcgccccattggcacccgttacctcacccgtaatctgtaattgcttgttaatcaataaaccggttgattcgtttcagttgaactttggtctctgcgaagggcgaattc

SEQ ID NO: 94 - protein, 738 aa, Artificial Sequence
  Synthetic polypeptide
MAADGYLPDWLEDNLSEGIREWWDLKPGAPKPKANQQKQDDGRGLVLPGYKYLGPFNGLDKGEPVNAADAAALEHDKAYDQQLKAGDNPYLRYNHADAEFQERLQEDTSFGGNLGRAVFQAKKRVLEPLGLVEEGAKTAPGKKRPVEPSPQRSPDSSTGIGKKGQQPAKKRLNFGQTGDSESVPDPQPIGEPPAGPSGLGSGTMAAGGGAPMADNNEGADGVGSSSGNWHCDSTWLGDRVITTSTRTWALPTYNNHLYKQISNGTSGGSTNDNTYFGYSTPWGYFDFNRFHCHFSPRDWQRLINNNWGFRPKRPNFKLFNIQVKEVTQNEGTKTIANNLTSTIQVFTDSEYQLPYVLGSAHQGCLPPFPADVFMIPQYGYLTLNNGSQAVGRSSFYCLEYFPSQMLRTGNNFEFSYQFEDVPFHSSYAHSQSLDRLMNPLIDQYLYYLSRTQSTGGTAGTQQLLFSQAGPNNMSAQAKNWLPGPCYRQQRVSTTLSQNNNSNFAWTGATKYHLNGRDSLVNPGVAMATHKDDEERFFPSSGVLMFGKQGAGKDNVDYSSVMLTSEEEIKTTNPVATEQYGVVADNLQQQNAAPIVGAVNSQGALPGMVWQNRDVYLQGPIWAKIPHTDGNFHPSPLMGGFGLKHPPPQILIKNTPVPADPPTTFSQAKLASFITQYSTGQVSVEIEWELQKENSKRWNPEIQYTSNYYKSTNVDFAVNTDGTYSEPRPIGTRYLTRNL

SEQ ID NO: 95 - protein, 738 aa, Artificial Sequence
  Synthetic polypeptide
MAADGYLPDWLEDNLSEGIREWWDLKPGAPKPKANQQKQDDGRGLVLPGYKYLGPFNGLDKGEPVNAADAAALEHDKAYDQQLKAGDNPYLRYNHADAEFQERLQEDTSFGGNLGRAVFQAKKRVLEPLGLVEEAAKTAPGKKRPVEPSPQRSPDSSTGIGKKGQQPAKKRLNFGQTGDSESVPDPQPIGEPPAGPSGLGSGTMAAGGGAPMADNNEGADGVGSSSGNWHCDSTWLGDRVITTSTRTWALPTYNNHLYKQISNGTSGGSTNDNTYFGYSTPWGYFDFNRFHCHFSPRDWQRLINNNWGFRPKRLSFKLFNIQVKEVTQNEGTKTIANNLTSTIQVFTDSEYQLPYVLGSAHQGCLPPFPADVFMIPQYGYLTLNNGSQAVGRSSFYCLEYFPSQMLRTGNNFEFSYTFEDVPFHSSYAHSQSLDRLMNPLIDQYLYYLSRTQSTGGTQGTQQLLFSQAGPANMSAQAKNWLPGPCYRQQRVSTTLSQNNNSNFAWTGATKYHLNGRDSLVNPGVAMATHKDDEERFFPSSGVLMFGKQGAGRDNVDYSSVMLTSEEEIKTTNPVATEQYGVVADNLQQTNTGPIVGNVNSQGALPGMVWQNRDVYLQGPIWAKIPHTDGNFHPSPLMGGFGLKHPPPQILIKNTPVPADPPTTFSQAKLASFITQYSTGQVSVEIEWELQKENSKRWNPEIQYTSNYYKSTNVDFAVNTEGTYSEPRPIGTRYLTRNL

SEQ ID NO: 96 - DNA, 2172 bp, Artificial Sequence
  Synthetic polynucleotide
atgtcttttgttgatcaccctccagattggttggaagaagttggtgaaggtcttcgcgagtttttgggccttgaagcgggcccaccgaaaccaaaacccaatcagcagcatcaagatcaagcccgtggtcttgtgctgcctggttataactatctcggacccggaaacggtctcgatcgaggagagcctgtcaacagggcagacgaggtcgcgcgagagcacgacatctcgtacaacgagcagcttgaggcgggagacaacccctacctcaagtacaaccacgcggacgccgagtttcaggagaagctcgccgacgacacatccttcgggggaaacctcggaaaggcagtctttcaggccaagaaaagggttctcgaaccttttggcctggttgaagagggtgctaagacggcccctaccggaaagcggatagacgaccactttccaaaaagaaagaaggctcggaccgaagaggactccaagccttccacctcgtcagacgccgaagctggacccagcggatcccagcagctgcaaatcccagcccaaccagcctcaagtttgggagctgatacaatgtctgcgggaggtggcggcccattgggcgacaataaccaaggtgccgatggagtgggcaatgcctcgggagattggcattgcgattccacgtggatgggggacagagtcgtcaccaagtccacccgaacctgggtgctgcccagctacaacaaccaccagtaccgagagatcaaaagcggctccgtcgacggaagcaacgccaacgcctactttggatacagcaccccctgggggtactttgactttaaccgcttccacagccactggagcccccgagactggcaaagactcatcaacaactactggggcttcagaccccggtccctcagagtcaaaatcttcaacattcaagtcaaagaggtcacggtgcaggactccaccaccaccatcgccaacaacctcacctccaccgtccaagtgtttacggacgacgactaccagctgccctacgtcgtcggcaacgggaccgagggatgcctgccggccttccctccgcaggtctttacgctgccgcagtacggttacgcgacgctgaaccgcgacaacacagaaaatcccaccgagaggagcagcttcttctgcctagagtactttcccagcaagatgctgagaacgggcaacaactttgagtttacctacaactttgaggaggtgcccttccactccagcttcgctcccagtcagaacctgttcaagctggccaacccgctggtggaccagtacttgtaccgcttcgtgagcacaaataacactggcggagtccagttcaacaagaacctggccgggagatacgccaacacctacaaaaactggttcccggggcccatgggccgaacccagggctggaacctgggctccggggtcaaccgcgccagtgtcagcgccttcgccacgaccaataggatggagctcgagggcgcgagttaccaggtgcccccgcagccgaacggcatgaccaacaacctccagggcagcaacacctatgccctggagaacactatgatcttcaacagccagccggcgaacccgggcaccaccgccacgtacctcgagggcaacatgctcatcaccagcgagagcgagacgcagccggtgaaccgcgtggcgtacaacgtcggcgggcagatggccaccaacaaccagagctccaccactgcccccgcgaccggcacgtacaacctccaggaaatcgtgcccggcagcgtgtggatggagagggacgtgtacctccaaggacccatctgggccaagatcccagagacgggggcgcactttcacccctctccggccatgggcggattcggactcaaacacccaccgcccatgatgctcatcaagaacacgcctgtgcccggaaatatcaccagcttctcggacgtgcccgtcagcagcttcatcacccagtacagcaccgggcaggtcaccgtggagatggagtgggagctcaagaaggaaaactccaagaggtggaacccagagatccagtacacaaacaactacaacgacccccagtttgtggactttgccccggacagcaccggggaatacagaaccaccagacctatcggaacccgataccttacccgacccctt

SEQ ID NO: 97 - protein, 720 aa, Artificial Sequence
  Synthetic polypeptide
MSFVDHPPDWLEEVGEGLREFLGLEAGPPKPKPNQQHQDQARGLVLPGYNYLGPGNGLDRGEPVNRADEVAREHDISYNEQLEAGDNPYLKYNHADAEFQEKLADDTSFGGNLGKAVFQAKKRVLEPFGLVEEGAKTAPTGKRIDDHFPKRKKARTEEDSKPSTSSDAEAGPSGSQQLQIPAQPASSLGADTMSAGGGGPLGDNNQGADGVGNASGDWHCDSTWMGDRVVTKSTRTWVLPSYNNHQYREIKSGSVDGSNANAYFGYSTPWGYFDFNRFHSHWSPRDWQRLINNYWGFRPRSLRVKIFNIQVKEVTVQDSTTTIANNLTSTVQVFTDDDYQLPYVVGNGTEGCLPAFPPQVFTLPQYGYATLNRDNTENPTERSSFFCLEYFPSKMLRTGNNFEFTYNFEEVPFHSSFAPSQNLFKLANPLVDQYLYRFVSTNNTGGVQFNKNLAGRYANTYKNWFPGPMGRTQGWNLGSGVNRASVSAFATTNRMELEGASYQVPPQPNGMTNNLQGSNTYALENTMIFNSQPANPGTTATYLEGNMLITSESETQPVNRVAYNVGGQMATNNQSSTTAPATGTYNLQEIVPGSVWMERDVYLQGPIWAKIPETGAHFHPSPAMGGFGLKHPPPMMLIKNTPVPGNITSFSDVPVSSFITQYSTGQVTVEMEWELKKENSKRWNPEIQYTNNYNDPQFVDFAPDSTGEYRTTRPIGTRYL

SEQ ID NO: 98 - protein, 724 aa, Adeno-associated virus 5
MSFVDHPPDWLEEVGEGLREFLGLEAGPPKPKPNQQHQDQARGLVLPGYNYLGPGNGLDRGEPVNRADEVAREHDISYNEQLEAGDNPYLKYNHADAEFQEKLADDTSFGGNLGKAVFQAKKRVLEPFGLVEEGAKTAPTGKRIDDHFPKRKKARTEEDSKPSTSSDAEAGPSGSQQLQIPAQPASSLGADTMSAGGGGPLGDNNQGADGVGNASGDWHCDSTWMGDRVVTKSTRTWVLPSYNNHQYREIKSGSVDGSNANAYFGYSTPWGYFDFNRFHSHWSPRDWQRLINNYWGFRPRSLRVKIFNIQVKEVTVQDSTTTIANNLTSTVQVFTDDDYQLPYVVGNGTEGCLPAFPPQVFTLPQYGYATLNRDNTENPTERSSFFCLEYFPSKMLRTGNNFEFTYNFEEVPFHSSFAPSQNLFKLANPLVDQYLYRFVSTNNTGGVQFNKNLAGRYANTYKNWFPGPMGRTQGWNLGSGVNRASVSAFATTNRMELEGASYQVPPQPNGMTNNLQGSNTYALENTMIFNSQPANPGTTATYLEGNMLITSESETQPVNRVAYNVGGQMATNNQSSTTAPATGTYNLQEIVPGSVWMERDVYLQGPIWAKIPETGAHFHPSPAMGGFGLKHPPPMMLIKNTPVPGNITSFSDVPVSSFITQYSTGQVTVEMEWELKKENSKRWNPEIQYTNNYNDPQFVDFAPDSTGEYRTTRPIGTRYLTRPL

SEQ ID NO: 99 - DNA, 2175 bp, Adeno-associated virus 5
atgtcttttgttgatcaccctccagattggttggaagaagttggtgaaggtcttcgcgagtttttgggccttgaagcgggcccaccgaaaccaaaacccaatcagcagcatcaagatcaagcccgtggtcttgtgctgcctggttataactatctcggacccggaaacggtctcgatcgaggagagcctgtcaacagggcagacgaggtcgcgcgagagcacgacatctcgtacaacgagcagcttgaggcgggagacaacccctacctcaagtacaaccacgcggacgccgagtttcaggagaagctcgccgacgacacatccttcgggggaaacctcggaaaggcagtctttcaggccaagaaaagggttctcgaaccttttggcctggttgaagagggtgctaagacggcccctaccggaaagcggatagacgaccactttccaaaaagaaagaaggctcggaccgaagaggactccaagccttccacctcgtcagacgccgaagctggacccagcggatcccagcagctgcaaatcccagcccaaccagcctcaagtttgggagctgatacaatgtctgcgggaggtggcggcccattgggcgacaataaccaaggtgccgatggagtgggcaatgcctcgggagattggcattgcgattccacgtggatgggggacagagtcgtcaccaagtccacccgaacctgggtgctgcccagctacaacaaccaccagtaccgagagatcaaaagcggctccgtcgacggaagcaacgccaacgcctactttggatacagcaccccctgggggtactttgactttaaccgcttccacagccactggagcccccgagactggcaaagactcatcaacaactactggggcttcagaccccggtccctcagagtcaaaatcttcaacattcaagtcaaagaggtcacggtgcaggactccaccaccaccatcgccaacaacctcacctccaccgtccaagtgtttacggacgacgactaccagctgccctacgtcgtcggcaacgggaccgagggatgcctgccggccttccctccgcaggtctttacgctgccgcagtacggttacgcgacgctgaaccgcgacaacacagaaaatcccaccgagaggagcagcttcttctgcctagagtactttcccagcaagatgctgagaacgggcaacaactttgagtttacctacaactttgaggaggtgcccttccactccagcttcgctcccagtcagaacctgttcaagctggccaacccgctggtggaccagtacttgtaccgcttcgtgagcacaaataacactggcggagtccagttcaacaagaacctggccgggagatacgccaacacctacaaaaactggttcccggggcccatgggccgaacccagggctggaacctgggctccggggtcaaccgcgccagtgtcagcgccttcgccacgaccaataggatggagctcgagggcgcgagttaccaggtgcccccgcagccgaacggcatgaccaacaacctccagggcagcaacacctatgccctggagaacactatgatcttcaacagccagccggcgaacccgggcaccaccgccacgtacctcgagggcaacatgctcatcaccagcgagagcgagacgcagccggtgaaccgcgtggcgtacaacgtcggcgggcagatggccaccaacaaccagagctccaccactgcccccgcgaccggcacgtacaacctccaggaaatcgtgcccggcagcgtgtggatggagagggacgtgtacctccaaggacccatctgggccaagatcccagagacgggggcgcactttcacccctctccggccatgggcggattcggactcaaacacccaccgcccatgatgctcatcaagaacacgcctgtgcccggaaatatcaccagcttctcggacgtgcccgtcagcagcttcatcacccagtacagcaccgggcaggtcaccgtggagatggagtgggagctcaagaaggaaaactccaagaggtggaacccagagatccagtacacaaacaactacaacgacccccagtttgtggactttgccccggacagcaccggggaatacagaaccaccagacctatcggaacccgataccttacccgacccctttaa

SEQ ID NO: 100 - DNA, 2208 bp, Artificial Sequence
  Synthetic polynucleotide
atggctgccgatggttatcttccagattggctcgaggacaacctctctgagggcattcgcgagtggtgggacttgaaacctggagccccgaaacccaaagccaaccagcaaaagcaggacgacggccggggtctggtgcttcctggctacaagtacctcggacccttcaacggactcgacaagggggagcccgtcaacgcggcggatgcagcggccctcgagcacgacaaggcctacgaccagcagctcaaagcgggtgacaatccgtacctgcggtataaccacgccgacgccgagtttcaggagcgtctgcaagaagatacgtcttttgggggcaacctcgggcgagcagtcttccaggccaagaagagggttctcgaaccttttggtctggttgaggaaggtgctaagacggctcctggaaagaaacgtccggtagagcagtcgccacaagagccagactcctcctcgggcattggcaagacaggccagcagcccgctaaaaagagactcaattttggtcagactggcgactcagagtcagtccccgacccacaacctctcggagaacctccagcaacccccgctgctgtgggacctactacaatggcttcaggcggtggcgcaccaatggcagacaataacgaaggcgccgacggagtgggtaatgcctcaggaaattggcattgcgattccacatggctgggcgacagagtcatcaccaccagcacccgaacatgggccttgcccacctataacaaccacctctacaagcaaatctccagtgcttcaacgggggccagcaacgacaaccactacttcggctacagcaccccctgggggtattttgatttcaacagattccactgccatttctcaccacgtgactggcagcgactcatcaacaacaattggggattccggcccaagagactcaacttcaagctcttcaacatccaagtcaaggaggtcacgacgaatgatggcgtcacgaccatcgctaataaccttaccagcacggttcaagtcttctcggactcggagtaccagttgccgtacgtcctcggctctgcgcaccagggctgcctccctccgttcccggcggacgtgttcatgattccgcagtacggctacctaacgctcaacaatggcagccaggcagtgggacggtcatccttttactgcctggaatatttcccatcgcagatgctgagaacgggcaataactttaccttcagctacaccttcgaggacgtgcctttccacagcagctacgcgcacagccagagcctggaccggctgatgaatcctctcatcgaccagtacctgtattacctgaacagaactcagaatcagtccggaagtgcccaaaacaaggacttgctgtttagccgggggtctccagctggcatgtctgttcagcccaaaaactggctacctggaccctgttaccggcagcagcgcgtttctaaaacaaaaacagacaacaacaacagcaactttacctggactggtgcttcaaaatataaccttaatgggcgtgaatctataatcaaccctggcactgctatggcctcacacaaagacgacaaagacaagttctttcccatgagcggtgtcatgatttttggaaaggagagcgccggagcttcaaacactgcattggacaatgtcatgatcacagacgaagaggaaatcaaagccactaaccccgtggccaccgaaagatttgggactgtggcagtcaatctccagagcagcagcacagaccctgcgaccggagatgtgcatgttatgggagccttacctggaatggtgtggcaagacagagacgtatacctgcagggtcctatttgggccaaaattcctcacacggatggacactttcacccgtctcctctcatgggcggctttggacttaagcacccgcctcctcagatcctcatcaaaaacacgcctgttcctgcgaatcctccggcagagttttcggctacaaagtttgcttcattcatcacccagtattccacaggacaagtgagcgtggagattgaatgggagctgcagaaagaaaacagcaaacgctggaatcccgaagtgcagtatacatctaactatgcaaaatctgccaacgttgatttcactgtggacaacaatggactttatactgagcctcgccccattggcacccgttacctcacccgtcccctg

SEQ ID NO: 101 - protein, 736 aa, Adeno-associated virus 6
MAADGYLPDWLEDNLSEGIREWWDLKPGAPKPKANQQKQDDGRGLVLPGYKYLGPFNGLDKGEPVNAADAAALEHDKAYDQQLKAGDNPYLRYNHADAEFQERLQEDTSFGGNLGRAVFQAKKRVLEPFGLVEEGAKTAPGKKRPVEQSPQEPDSSSGIGKTGQQPAKKRLNFGQTGDSESVPDPQPLGEPPATPAAVGPTTMASGGGAPMADNNEGADGVGNASGNWHCDSTWLGDRVITTSTRTWALPTYNNHLYKQISSASTGASNDNHYFGYSTPWGYFDFNRFHCHFSPRDWQRLINNNWGFRPKRLNFKLFNIQVKEVTTNDGVTTIANNLTSTVQVFSDSEYQLPYVLGSAHQGCLPPFPADVFMIPQYGYLTLNNGSQAVGRSSFYCLEYFPSQMLRTGNNFTFSYTFEDVPFHSSYAHSQSLDRLMNPLIDQYLYYLNRTQNQSGSAQNKDLLFSRGSPAGMSVQPKNWLPGPCYRQQRVSKTKTDNNNSNFTWTGASKYNLNGRESIINPGTAMASHKDDKDKFFPMSGVMIFGKESAGASNTALDNVMITDEEEIKATNPVATERFGTVAVNLQSSSTDPATGDVHVMGALPGMVWQDRDVYLQGPIWAKIPHTDGHFHPSPLMGGFGLKHPPPQILIKNTPVPANPPAEFSATKFASFITQYSTGQVSVEIEWELQKENSKRWNPEVQYTSNYAKSANVDFTVDNNGLYTEPRPIGTRYLTRPL

SEQ ID NO: 102 - protein, 623 aa, Adeno-associated virus 6
MPGFYEIVIKVPSDLDEHLPGISDSFVNWVAEKEWELPPDSDMDLNLIEQAPLTVAEKLQRDFLVQWRRVSKAPEALFFVQFEKGESYFHLHILVETTGVKSMVLGRFLSQIRDKLVQTIYRGIEPTLPNWFAVTKTRNGAGGGNKVVDECYIPNYLLPKTQPELQWAWTNMEEYISACLNLAERKRLVAHDLTHVSQTQEQNKENLNPNSDAPVIRSKTSARYMELVGWLVDRGITSEKQWIQEDQASYISFNAASNSRSQIKAALDNAGKIMALTKSAPDYLVGPAPPADIKTNRIYRILELNGYDPAYAGSVFLGWAQKRFGKRNTIWLFGPATTGKTNIAEAIAHAVPFYGCVNWTNENFPFNDCVDKMVIWWEEGKMTAKVVESAKAILGGSKVRVDQKCKSSAQIDPTPVIVTSNTNMCAVIDGNSTTFEHQQPLQDRMFKFELTRRLEHDFGKVTKQEVKEFFRWAQDHVTEVAHEFYVRKGGANKRPAPDDADKSEPKRACPSVADPSTSDAEGAPVDFADRYQNKCSRHAGMLQMLFPCKTCERMNQNFNICFTHGTRDCSECFPGVSESQPVVRKRTYRKLCAIHHLLGRAPEIACSACDLVNVDLDDCVSEQ

SEQ ID NO: 103 - DNA, 4683 bp, Adeno-associated virus 6
ttggccactccctctctgcgcgctcgctcgctcactgaggccgggcgaccaaaggtcgcccgacgcccgggctttgcccgggcggcctcagtgagcgagcgagcgcgcagagagggagtggccaactccatcactaggggttcctggaggggtggagtcgtgacgtgaattacgtcatagggttagggaggtcctgtattagaggtcacgtgagtgttttgcgacattttgcgacaccatgtggtcacgctgggtatttaagcccgagtgagcacgcagggtctccattttgaagcgggaggtttgaacgcgcagcgccatgccggggttttacgagattgtgattaaggtccccagcgaccttgacgagcatctgcccggcatttctgacagctttgtgaactgggtggccgagaaggaatgggagttgccgccagattctgacatggatctgaatctgattgagcaggcacccctgaccgtggccgagaagctgcagcgcgacttcctggtccagtggcgccgcgtgagtaaggccccggaggccctcttctttgttcagttcgagaagggcgagtcctacttccacctccatattctggtggagaccacgggggtcaaatccatggtgctgggccgcttcctgagtcagattagggacaagctggtgcagaccatctaccgcgggatcgagccgaccctgcccaactggttcgcggtgaccaagacgcgtaatggcgccggaggggggaacaaggtggtggacgagtgctacatccccaactacctcctgcccaagactcagcccgagctgcagtgggcgtggactaacatggaggagtatataagcgcgtgtttaaacctggccgagcgcaaacggctcgtggcgcacgacctgacccacgtcagccagacccaggagcagaacaaggagaatctgaaccccaattctgacgcgcctgtcatccggtcaaaaacctccgcacgctacatggagctggtcgggtggctggtggaccggggcatcacctccgagaagcagtggatccaggaggaccaggcctcgtacatctccttcaacgccgcctccaactcgcggtcccagatcaaggccgctctggacaatgccggcaagatcatggcgctgaccaaatccgcgcccgactacctggtaggccccgctccgcccgccgacattaaaaccaaccgcatttaccgcatcctggagctgaacggctacgaccctgcctacgccggctccgtctttctcggctgggcccagaaaaggttcggaaaacgcaacaccatctggctgtttgggccggccaccacgggcaagaccaacatcgcggaagccatcgcccacgccgtgcccttctacggctgcgtcaactggaccaatgagaactttcccttcaacgattgcgtcgacaagatggtgatctggtgggaggagggcaagatgacggccaaggtcgtggagtccgccaaggccattctcggcggcagcaaggtgcgcgtggaccaaaagtgcaagtcgtccgcccagatcgatcccacccccgtgatcgtcacctccaacaccaacatgtgcgccgtgattgacgggaacagcaccaccttcgagcaccagcagccgttgcaggaccggatgttcaaatttgaactcacccgccgtctggagcatgactttggcaaggtgacaaagcaggaagtcaaagagttcttccgctgggcgcaggatcacgtgaccgaggtggcgcatgagttctacgtcagaaagggtggagccaacaagagacccgcccccgatgacgcggataaaagcgagcccaagcgggcctgcccctcagtcgcggatccatcgacgtcagacgcggaaggagctccggtggactttgccgacaggtaccaaaacaaatgttctcgtcacgcgggcatgcttcagatgctgtttccctgcaaaacatgcgagagaatgaatcagaatttcaacatttgcttcacgcacgggaccagagactgttcagaatgtttccccggcgtgtcagaatctcaaccggtcgtcagaaagaggacgtatcggaaactctgtgccattcatcatctgctggggcgggctcccgagattgcttgctcggcctgcgatctggtcaacgtggatctggatgactgtgtttctgagcaataaatgacttaaaccaggtatggctgccgatggttatcttccagattggctcgaggacaacctctctgagggcattcgcgagtggtgggacttgaaacctggagccccgaaacccaaagccaaccagcaaaagcaggacgacggccggggtctggtgcttcctggctacaagtacctcggacccttcaacggactcgacaagggggagcccgtcaacgcggcggatgcagcggccctcgagcacgacaaggcctacgaccagcagctcaaagcgggtgacaatccgtacctgcggtataaccacgccgacgccgagtttcaggagcgtctgcaagaagatacgtcttttgggggcaacctcgggcgagcagtcttccaggccaagaagagggttctcgaaccttttggtctggttgaggaaggtgctaagacggctcctggaaagaaacgtccggtagagcagtcgccacaagagccagactcctcctcgggcattggcaagacaggccagcagcccgctaaaaagagactcaattttggtcagactggcgactcagagtcagtccccgacccacaacctctcggagaacctccagcaacccccgctgctgtgggacctactacaatggcttcaggcggtggcgcaccaatggcagacaataacgaaggcgccgacggagtgggtaatgcctcaggaaattggcattgcgattccacatggctgggcgacagagtcatcaccaccagcacccgaacatgggccttgcccacctataacaaccacctctacaagcaaatctccagtgcttcaacgggggccagcaacgacaaccactacttcggctacagcaccccctgggggtattttgatttcaacagattccactgccatttctcaccacgtgactggcagcgactcatcaacaacaattggggattccggcccaagagactcaacttcaagctcttcaacatccaagtcaaggaggtcacgacgaatgatggcgtcacgaccatcgctaataaccttaccagcacggttcaagtcttctcggactcggagtaccagttgccgtacgtcctcggctctgcgcaccagggctgcctccctccgttcccggcggacgtgttcatgattccgcagtacggctacctaacgctcaacaatggcagccaggcagtgggacggtcatccttttactgcctggaatatttcccatcgcagatgctgagaacgggcaataactttaccttcagctacaccttcgaggacgtgcctttccacagcagctacgcgcacagccagagcctggaccggctgatgaatcctctcatcgaccagtacctgtattacctgaacagaactcagaatcagtccggaagtgcccaaaacaaggacttgctgtttagccgggggtctccagctggcatgtctgttcagcccaaaaactggctacctggaccctgttaccggcagcagcgcgtttctaaaacaaaaacagacaacaacaacagcaactttacctggactggtgcttcaaaatataaccttaatgggcgtgaatctataatcaaccctggcactgctatggcctcacacaaagacgacaaagacaagttctttcccatgagcggtgtcatgatttttggaaaggagagcgccggagcttcaaacactgcattggacaatgtcatgatcacagacgaagaggaaatcaaagccactaaccccgtggccaccgaaagatttgggactgtggcagtcaatctccagagcagcagcacagaccctgcgaccggagatgtgcatgttatgggagccttacctggaatggtgtggcaagacagagacgtatacctgcagggtcctatttgggccaaaattcctcacacggatggacactttcacccgtctcctctcatgggcggctttggacttaagcacccgcctcctcagatcctcatcaaaaacacgcctgttcctgcgaatcctccggcagagttttcggctacaaagtttgcttcattcatcacccagtattccacaggacaagtgagcgtggagattgaatgggagctgcagaaagaaaacagcaaacgctggaatcccgaagtgcagtatacatctaactatgcaaaatctgccaacgttgatttcactgtggacaacaatggactttatactgagcctcgccccattggcacccgttacctcacccgtcccctgtaattgtgtgttaatcaataaaccggttaattcgtgtcagttgaactttggtctcatgtcgttattatcttatctggtcaccatagcaaccggttacacattaactgcttagttgcgcttcgcgaatacccctagtgatggagttgcccactccctctatgcgcgctcgctcgctcggtggggccggcagagcagagctctgccgtctgcggacctttggtccgcaggccccaccgagcgagcgagcgcgcatagagggagtgggcaa

SEQ ID NO: 104 - DNA, 2211 bp, Artificial Sequence
  Synthetic polynucleotide
atggctgccgatggttatcttccagattggctcgaggacaacctctctgagggcattcgcgagtggtgggacttgaaacctggagccccgaaacccaaagccaaccagcaaaagcaggacgacggccggggtctggtgcttcctggctacaagtacctcggacccttcaacggactcgacaagggggagcccgtcaacgcggcggatgcagcggccctcgagcacgacaaggcctacgaccagcagctcaaagcgggtgacaatccgtacctgcggtataaccacgccgacgccgagtttcaggagcgtctgcaagaagatacgtcttttgggggcaacctcgggcgagcagtcttccaggccaagaagagggttctcgaaccttttggtctggttgaggaaggtgctaagacggctcctggaaagaaacgtccggtagagcagtcgccacaagagccagactcctcctcgggcattggcaagacaggccagcagcccgctaaaaagagactcaattttggtcagactggcgactcagagtcagtccccgacccacaacctctcggagaacctccagcaacccccgctgctgtgggacctactacaatggcttcaggcggtggcgcaccaatggcagacaataacgaaggcgccgacggagtgggtaatgcctcaggaaattggcattgcgattccacatggctgggcgacagagtcatcaccaccagcacccgaacatgggccttgcccacctataacaaccacctctacaagcaaatctccagtgcttcaacgggggccagcaacgacaaccactacttcggctacagcaccccctgggggtattttgatttcaacagattccactgccatttctcaccacgtgactggcagcgactcatcaacaacaattggggattccggcccaagagactcaacttcaagctcttcaacatccaagtcaaggaggtcacgacgaatgatggcgtcacgaccatcgctaataaccttaccagcacggttcaagtcttctcggactcggagtaccagttgccgtacgtcctcggctctgcgcaccagggctgcctccctccgttcccggcggacgtgttcatgattccgcagtacggctacctaacgctcaacaatggcagccaggcagtgggacggtcatccttttactgcctggaatatttcccatcgcagatgctgagaacgggcaataactttaccttcagctacaccttcgaggacgtgcctttccacagcagctacgcgcacagccagagcctggaccggctgatgaatcctctcatcgaccagtacctgtattacctgaacagaactcagaatcagtccggaagtgcccaaaacaaggacttgctgtttagccgggggtctccagctggcatgtctgttcagcccaaaaactggctacctggaccctgttaccggcagcagcgcgtttctaaaacaaaaacagacaacaacaacagcaactttacctggactggtgcttcaaaatataaccttaatgggcgtgaatctataatcaaccctggcactgctatggcctcacacaaagacgacaaagacaagttctttcccatgagcggtgtcatgatttttggaaaggagagcgccggagcttcaaacactgcattggacaatgtcatgatcacagacgaagaggaaatcaaagccactaaccccgtggccaccgaaagatttgggactgtggcagtcaatctccagagcagcagcacagaccctgcgaccggagatgtgcatgttatgggagccttacctggaatggtgtggcaagacagagacgtatacctgcagggtcctatttgggccaaaattcctcacacggatggacactttcacccgtctcctctcatgggcggctttggacttaagcacccgcctcctcagatcctcatcaaaaacacgcctgttcctgcgaatcctccggcagagttttcggctacaaagtttgcttcattcatcacccagtattccacaggacaagtgagcgtggagattgaatgggagctgcagaaagaaaacagcaaacgctggaatcccgaagtgcagtatacatctaactatgcaaaatctgccaacgttgatttcactgtggacaacaatggactttatactgagcctcgccccattggcacccgttacctcacccgtcccctgtaa

SEQ ID NO: 105 - protein, 736 aa, Artificial Sequence; identical to SEQ ID NO: 101
  Synthetic polypeptide

SEQ ID NO: 106 - protein, 736 aa, Artificial Sequence
  Synthetic polypeptide
MAADGYLPDWLEDNLSEGIREWWDLKPGAPKPKANQQKQDDGRGLVLPGYKYLGPFNGLDKGEPVNAADAAALEHDKAYDQQLKAGDNPYLRYNHADAEFQERLQEDTSFGGNLGRAVFQAKKRVLEPFGLVEEGAKTAPGKKRPVEQSPQEPDSSSGIGKTGQQPAKKRLNFGQTGDSESVPDPQPLGEPPATPAAVGPTTMASGGGAPMADNNEGADGVGNASGNWHCDSTWLGDRVITTSTRTWALPTYNNHLYKQISSASTGASNDNHYFGYSTPWGYFDFNRFHCHFSPRDWQRLINNNWGFRPKRLNFKLFNIQVKEVTTNDGVTTIANNLTSTVQVFSDSEYQLPYVLGSAHQGCLPPFPADVFMIPQYGYLTLNNGSQAVGRSSFYCLEYFPSQMLRTGNNFTFSYTFEDVPFHSSYAHSQSLDRLMNPLIDQYLYYLNRTQNQSGSAQNKDLLFSRGSPAGMSVQPKNWLPGPCYRQQRVSKTKTDNNNSNFTWTGASKYNLNGRESIINPGTAMASHKDDEDKFFPMSGVMIFGKESAGASNTALDNVMITDEEEIKATNPVATERFGTVAVNLQSSSTDPATGDVHVMGALPGMVWQDRDVYLQGPIWAKIPHTDGHFHPSPLMGGFGLKHPPPQILIKNTPVPANPPAEFSATKFASFITQYSTGQVSVEIEWELQKENSKRWNPEVQYTSNYAKSANVDFTVDNNGLYTEPRPIGTRYLTRPL

SEQ ID NO: 107 - protein, 736 aa, Artificial Sequence
  Synthetic polypeptide
MAADGYLPDWLEDNLSEGIREWWDLKPGAPKPKANQQKQDDGRGLVLPGYKYLGPFNGLDKGEPVNAADAAALEHDKAYDQQLKAGDNPYLRYNHADAEFQERLQEDTSFGGNLGRAVFQAKKRVLEPLGLVEEGAKTAPGKKRPVEQSPQEPDSSSGIGKTGQQPAKKRLNFGQTGDSESVPDPQPLGEPPATPAAVGPTTMASGGGAPMADNNEGADGVGNASGNWHCDSTWLGDRVITTSTRTWALPTYNNHLYKQISSASTGASNDNHYFGYSTPWGYFDFNRFHCHFSPRDWQRLINNNWGFRPKRLNFKLFNIQVKEVTTNDGVTTIANNLTSTVQVFSDSEYQLPYVLGSAHQGCLPPFPADVFMIPQYGYLTLNNGSQAVGRSSFYCLEYFPSQMLRTGNNFTFSYTFEDVPFHSSYAHSQSLDRLMNPLIDQYLYYLNRTQNQSGSAQNKDLLFSRGSPAGMSVQPKNWLPGPCYRQQRVSKTKTDNNNSNFTWTGASKYNLNGRESIINPGTAMASHKDDEDKFFPMSGVMIFGKESAGASNTALDNVMITDEEEIKATNPVATERFGTVAVNLQSSSTDPATGDVHVMGALPGMVWQDRDVYLQGPIWAKIPHTDGHFHPSPLMGGFGLKHPPPQILIKNTPVPANPPAEFSATKFASFITQYSTGQVSVEIEWELQKENSKRWNPEVQYTSNYAKSANVDFTVDNNGLYTEPRPIGTRYLTRPL

SEQ ID NO: 108 - protein, 736 aa, Artificial Sequence
  Synthetic polypeptide
MAADGYLPDWLEDNLSEGIREWWDLKPGAPKPKANQQKQDDGRGLVLPGYKYLGPFNGLDKGEPVNAADAAALEHDKAYDQQLKAGDNPYLRYNHADAEFQERLQEDTSFGGNLGRAVFQAKKRVLEPLGLVEEGAKTAPGKKRPVEQSPQEPDSSSGIGKTGQQPAKKRLNFGQTGDSESVPDPQPLGEPPATPAAVGPTTMASGGGAPMADNNEGADGVGNASGNWHCDSTWLGDRVITTSTRTWALPTYNNHLYKQISSASTGASNDNHYFGYSTPWGYFDFNRFHCHFSPRDWQRLINNNWGFRPKRLNFKLFNIQVKEVTTNDGVTTIANNLTSTVQVFSDSEYQLPYVLGSAHQGCLPPFPADVFMIPQYGYLTLNNGSQAVGRSSFYCLEYFPSQMLRTGNNFTFSYTFEDVPFHSSYAHSQSLDRLMNPLIDQYLYYLNRTQNQSGSAQNKDLLFSRGSPAGMSVQPKNWLPGPCYRQQRVSKTKTDNNNSNFTWTGASKYNLNGRESIINPGTAMASHKDDKDKFFPMSGVMIFGKESAGASNTALDNVMITDEEEIKATNPVATERFGTVAVNLQSSSTDPATGDVHVMGALPGMVWQDRDVYLQGPIWAKIPHTDGHFHPSPLMGGFGLKHPPPQILIKNTPVPANPPAEFSATKFASFITQYSTGQVSVEIEWELQKENSKRWNPEVQYTSNYAKSANVDFTVDNNGLYTEPRPIGTRYLTRPL

SEQ ID NO: 109 - DNA, 2214 bp, Artificial Sequence
  Synthetic polynucleotide
atggctgccgatggttatcttccagattggctcgaggacaacctctctgagggcattcgcgagtggtgggacctgaaacctggagccccgaaacccaaagccaaccagcaaaagcaggacaacggccggggtctggtgcttcctggctacaagtacctcggacccttcaacggactcgacaagggggagcccgtcaacgcggcggacgcagcggccctcgagcacgacaaggcctacgaccagcagctcaaagcgggtgacaatccgtacctgcggtataaccacgccgacgccgagtttcaggagcgtctgcaagaagatacgtcatttgggggcaacctcgggcgagcagtcttccaggccaagaagcgggttctcgaacctctcggtctggttgaggaaggcgctaagacggctcctgcaaagaagagaccggtagagccgtcacctcagcgttcccccgactcctccacgggcatcggcaagaaaggccagcagcccgccagaaagagactcaatttcggtcagactggcgactcagagtcagtccccgaccctcaacctctcggagaacctccagcagcgccctctagtgtgggatctggtacagtggctgcaggcggtggcgcaccaatggcagacaataacgaaggtgccgacggagtgggtaatgcctcaggaaattggcattgcgattccacatggctgggcgacagagtcattaccaccagcacccgaacctgggccctgcccacctacaacaaccacctctacaagcaaatctccagtgaaactgcaggtagtaccaacgacaacacctacttcggctacagcaccccctgggggtattttgactttaacagattccactgccacttctcaccacgtgactggcagcgactcatcaacaacaactggggattccggcccaagaagctgcggttcaagctcttcaacatccaggtcaaggaggtcacgacgaatgacggcgttacgaccatcgctaataaccttaccagcacgattcaggtattctcggactcggaataccagctgccgtacgtcctcggctctgcgcaccagggctgcctgcctccgttcccggcggacgtcttcatgattcctcagtacggctacctgactctcaacaatggcagtcagtctgtgggacgttcctccttctactgcctggagtacttcccctctcagatgctgagaacgggcaacaactttgagttcagctacagcttcgaggacgtgcctttccacagcagctacgcacacagccagagcctggaccggctgatgaatcccctcatcgaccagtacttgtactacctggccagaacacagagtaacccaggaggcacagctggcaatcgggaactgcagttttaccagggcgggccttcaactatggccgaacaagccaagaattggttacctggaccttgcttccggcaacaaagagtctccaaaacgctggatcaaaacaacaacagcaactttgcttggactggtgccaccaaatatcacctgaacggcagaaactcgttggttaatcccggcgtcgccatggcaactcacaaggacgacgaggaccgctttttcccatccagcggagtcctgatttttggaaaaactggagcaactaacaaaactacattggaaaatgtgttaatgacaaatgaagaagaaattcgtcctactaatcctgtagccacggaagaatacgggatagtcagcagcaacttacaagcggctaatactgcagcccagacacaagttgtcaacaaccagggagccttacctggcatggtctggcagaaccgggacgtgtacctgcagggtcccatctgggccaagattcctcacacggatggcaactttcacccgtctcctttgatgggcggctttggacttaaacatccgcctcctcagatcctgatcaagaacactcccgttcccgctaatcctccggaggtgtttactcctgccaagtttgcttcgttcatcacacagtacagcaccggacaagtcagcgtggaaatcgagtgggagctgcagaaggaaaacagcaagcgctggaacccggagattcagtacacctccaactttgaaaagcagactggtgtggactttgccgttgacagccagggtgtttactctgagcctcgccctattggcactcgttacctcacccgtaatctgtaa

SEQ ID NO: 110 - protein, 738 aa, Artificial Sequence
  Synthetic polypeptide
MAADGYLPDWLEDNLSEGIREWWALKPGAPKPKANQQKQDDGRGLVLPGYKYLGPFNGLDKGEPVNAADAAALEHDKAYDQQLQAGDNPYLRYNHADAEFQERLQEDTSFGGNLGRAVFQAKKRVLEPLGLVEEGAKTAPGKKRPVEPSPQRSPDSSTGIGKKGQQPARKRLNFGQTGDSESVPDPQPLGEPPAAPSGVGPNTMAAGGGAPMADNNEGADGVGSSSGNWHCDSTWLGDRVITTSTRTWALPTYNNHLYKQISNGTSGGATNDNTYFGYSTPWGYFDFNRFHCHFSPRDWQRLINNNWGFRPKRLSFKLFNIQVKEVTQNEGTKTIANNLTSTIQVFTDSEYQLPYVLGSAHQGCLPPFPADVFMIPQYGYLTLNNGSQAVGRSSFYCLEYFPSQMLRTGNNFQFTYTFEDVPFHSSYAHSQSLDRLMNPLIDQYLYYLSRTQTTGGTANTQTLGFSQGGPNTMANQAKNWLPGPCYRQQRVSTTTGQNNNSNFAWTAGTKYHLNGRNSLANPGIAMATHKDDEERFFPSNGILIFGKQNAARDNADYSDVMLTSEEEIKTTNPVATEEYGIVADNLQQQNTAPQIGTVNSQGALPGMVWQNRDVYLQGPIWAKIPHTDGNFHPSPLMGGFGLKHPPPQILIKNTPVPADPPTTFNQSKLNSFITQYSTGQVSVEIEWELQKENSKRWNPEIQYTSNYYKSTSVDFAVNTEGVYSEPRPIGTRYLTRNL

SEQ ID NO: 111 - protein, 737 aa, Adeno-associated virus 7
MAADGYLPDWLEDNLSEGIREWWDLKPGAPKPKANQQKQDNGRGLVLPGYKYLGPFNGLDKGEPVNAADAAALEHDKAYDQQLKAGDNPYLRYNHADAEFQERLQEDTSFGGNLGRAVFQAKKRVLEPLGLVEEGAKTAPAKKRPVEPSPQRSPDSSTGIGKKGQQPARKRLNFGQTGDSESVPDPQPLGEPPAAPSSVGSGTVAAGGGAPMADNNEGADGVGNASGNWHCDSTWLGDRVITTSTRTWALPTYNNHLYKQISSETAGSTNDNTYFGYSTPWGYFDFNRFHCHFSPRDWQRLINNNWGFRPKKLRFKLFNIQVKEVTTNDGVTTIANNLTSTIQVFSDSEYQLPYVLGSAHQGCLPPFPADVFMIPQYGYLTLNNGSQSVGRSSFYCLEYFPSQMLRTGNNFEFSYSFEDVPFHSSYAHSQSLDRLMNPLIDQYLYYLARTQSNPGGTAGNRELQFYQGGPSTMAEQAKNWLPGPCFRQQRVSKTLDQNNNSNFAWTGATKYHLNGRNSLVNPGVAMATHKDDEDRFFPSSGVLIFGKTGATNKTTLENVLMTNEEEIRPTNPVATEEYGIVSSNLQAANTAAQTQVVNNQGALPGMVWQNRDVYLQGPIWAKIPHTDGNFHPSPLMGGFGLKHPPPQILIKNTPVPANPPEVFTPAKFASFITQYSTGQVSVEIEWELQKENSKRWNPEIQYTSNFEKQTGVDFAVDSQGVYSEPRPIGTRYLTRNL

SEQ ID NO: 112 - protein, 623 aa, Adeno-associated virus 7
MPGFYEIVIKVPSDLDEHLPGISDSFVNWVAEKEWELPPDSDMDLNLIEQAPLTVAEKLQRDFLVQWRRVSKAPEALFFVQFEKGESYFHLHVLVETTGVKSMVLGRFLSQIREKLVQTIYRGVEPTLPNWFAVTKTRNGAGGGNKVVDECYIPNYLLPKTQPELQWAWTNMEEYISACLNLAERKRLVAQHLTHVSQTQEQNKENLNPNSDAPVIRSKTSARYMELVGWLVDRGITSEKQWIQEDQASYISFNAASNSRSQIKAALDNAGKIMALTKSAPDYLVGPSLPADIKTNRIYRILELNGYDPAYAGSVFLGWAQKKFGKRNTIWLFGPATTGKTNIAEAIAHAVPFYGCVNWTNENFPFNDCVDKMVIWWEEGKMTAKVVESAKAILGGSKVRVDQKCKSSAQIDPTPVIVTSNTNMCAVIDGNSTTFEHQQPLQDRMFKFELTRRLEHDFGKVTKQEVKEFFRWASDHVTEVAHEFYVRKGGASKRPAPDDADISEPKRACPSVADPSTSDAEGAPVDFADRYQNKCSRHAGMIQMLFPCKTCERMNQNFNICFTHGVRDCLECFPGVSESQPVVRKKTYRKLCAIHHLLGRAPEIACSACDLVNVDLDDCVSEQ

SEQ ID NO: 113 - DNA, 4721 bp, Adeno-associated virus 7
ttggccactccctctatgcgcgctcgctcgctcggtggggcctgcggaccaaaggtccgcagacggcagagctctgctctgccggccccaccgagcgagcgagcgcgcatagagggagtggccaactccatcactaggggtaccgcgaagcgcctcccacgctgccgcgtcagcgctgacgtaaatcacgtcataggggagtggtcctgtattagctgtcacgtgagtgcttttgcgacattttgcgacaccacgtggccatttgaggtatatatggccgagtgagcgagcaggatctccattttgaccgcgaaatttgaacgagcagcagccatgccgggtttctacgagatcgtgatcaaggtgccgagcgacctggacgagcacctgccgggcatttctgactcgtttgtgaactgggtggccgagaaggaatgggagctgcccccggattctgacatggatctgaatctgatcgagcaggcacccctgaccgtggccgagaagctgcagcgcgacttcctggtccaatggcgccgcgtgagtaaggccccggaggccctgttctttgttcagttcgagaagggcgagagctacttccaccttcacgttctggtggagaccacgggggtcaagtccatggtgctaggccgcttcctgagtcagattcgggagaagctggtccagaccatctaccgcggggtcgagcccacgctgcccaactggttcgcggtgaccaagacgcgtaatggcgccggcggggggaacaaggtggtggacgagtgctacatccccaactacctcctgcccaagacccagcccgagctgcagtgggcgtggactaacatggaggagtatataagcgcgtgtttgaacctggccgaacgcaaacggctcgtggcgcagcacctgacccacgtcagccagacgcaggagcagaacaaggagaatctgaaccccaattctgacgcgcccgtgatcaggtcaaaaacctccgcgcgctacatggagctggtcgggtggctggtggaccggggcatcacctccgagaagcagtggatccaggaggaccaggcctcgtacatctccttcaacgccgcctccaactcgcggtcccagatcaaggccgcgctggacaatgccggcaagatcatggcgctgaccaaatccgcgcccgactacctggtggggccctcgctgcccgcggacattaaaaccaaccgcatctaccgcatcctggagctgaacgggtacgatcctgcctacgccggctccgtctttctcggctgggcccagaaaaagttcgggaagcgcaacaccatctggctgtttgggcccgccaccaccggcaagaccaacattgcggaagccatcgcccacgccgtgcccttctacggctgcgtcaactggaccaatgagaactttcccttcaacgattgcgtcgacaagatggtgatctggtgggaggagggcaagatgacggccaaggtcgtggagtccgccaaggccattctcggcggcagcaaggtgcgcgtggaccaaaagtgcaagtcgtccgcccagatcgaccccacccccgtgatcgtcacctccaacaccaacatgtgcgccgtgattgacgggaacagcaccaccttcgagcaccagcagccgttgcaggaccggatgttcaaatttgaactcacccgccgtctggagcacgactttggcaaggtgacgaagcaggaagtcaaagagttcttccgctgggccagtgatcacgtgaccgaggtggcgcatgagttctacgtcagaaagggcggagccagcaaaagacccgcccccgatgacgcggatataagcgagcccaagcgggcctgcccctcagtcgcggatccatcgacgtcagacgcggaaggagctccggtggactttgccgacaggtaccaaaacaaatgttctcgtcacgcgggcatgattcagatgctgtttccctgcaaaacgtgcgagagaatgaatcagaatttcaacatttgcttcacacacggggtcagagactgtttagagtgtttccccggcgtgtcagaatctcaaccggtcgtcagaaaaaagacgtatcggaaactctgcgcgattcatcatctgctggggcgggcgcccgagattgcttgctcggcctgcgacctggtcaacgtggacctggacgactgcgtttctgagcaataaatgacttaaaccaggtatggctgccgatggttatcttccagattggctcgaggacaacctctctgagggcattcgcgagtggtgggacctgaaacctggagccccgaaacccaaagccaaccagcaaaagcaggacaacggccggggtctggtgcttcctggctacaagtacctcggacccttcaacggactcgacaagggggagcccgtcaacgcggcggacgcagcggccctcgagcacgacaaggcctacgaccagcagctcaaagcgggtgacaatccgtacctgcggtataaccacgccgacgccgagtttcaggagcgtctgcaagaagatacgtcatttgggggcaacctcgggcgagcagtcttccaggccaagaagcgggttctcgaacctctcggtctggttgaggaaggcgctaagacggctcctgcaaagaagagaccggtagagccgtcacctcagcgttcccccgactcctccacgggcatcggcaagaaaggccagcagcccgccagaaagagactcaatttcggtcagactggcgactcagagtcagtccccgaccctcaacctctcggagaacctccagcagcgccctctagtgtgggatctggtacagtggctgcaggcggtggcgcaccaatggcagacaataacgaaggtgccgacggagtgggtaatgcctcaggaaattggcattgcgattccacatggctgggcgacagagtcattaccaccagcacccgaacctgggccctgcccacctacaacaaccacctctacaagcaaatctccagtgaaactgcaggtagtaccaacgacaacacctacttcggctacagcaccccctgggggtattttgactttaacagattccactgccacttctcaccacgtgactggcagcgactcatcaacaacaactggggattccggcccaagaagctgcggttcaagctcttcaacatccaggtcaaggaggtcacgacgaatgacggcgttacgaccatcgctaataaccttaccagcacgattcaggtattctcggactcggaataccagctgccgtacgtcctcggctctgcgcaccagggctgcctgcctccgttcccggcggacgtcttcatgattcctcagtacggctacctgactctcaacaatggcagtcagtctgtgggacgttcctccttctactgcctggagtacttcccctctcagatgctgagaacgggcaacaactttgagttcagctacagcttcgaggacgtgcctttccacagcagctacgcacacagccagagcctggaccggctgatgaatcccctcatcgaccagtacttgtactacctggccagaacacagagtaacccaggaggcacagctggcaatcgggaactgcagttttaccagggcgggccttcaactatggccgaacaagccaagaattggttacctggaccttgcttccggcaacaaagagtctccaaaacgctggatcaaaacaacaacagcaactttgcttggactggtgccaccaaatatcacctgaacggcagaaactcgttggttaatcccggcgtcgccatggcaactcacaaggacgacgaggaccgctttttcccatccagcggagtcctgatttttggaaaaactggagcaactaacaaaactacattggaaaatgtgttaatgacaaatgaagaagaaattcgtcctactaatcctgtagccacggaagaatacgggatagtcagcagcaacttacaagcggctaatactgcagcccagacacaagttgtcaacaaccagggagccttacctggcatggtctggcagaaccgggacgtgtacctgcagggtcccatctgggccaagattcctcacacggatggcaactttcacccgtctcctttgatgggcggctttggacttaaacatccgcctcctcagatcctgatcaagaacactcccgttcccgctaatcctccggaggtgtttactcctgccaagtttgcttcgttcatcacacagtacagcaccggacaagtcagcgtggaaatcgagtgggagctgcagaaggaaaacagcaagcgctggaacccggagattcagtacacctccaactttgaaaagcagactggtgtggactttgccgttgacagccagggtgtttactctgagcctcgccctattggcactcgttacctcacccgtaatctgtaattgcatgttaatcaataaaccggttgattcgtttcagttgaactttggtctcctgtgcttcttatcttatcggtttccatagcaactggttacacattaactgcttgggtgcgcttcacgataagaacactgacgtcaccgcggtacccctagtgatggagttggccactccctctatgcgcgctcgctcgctcggtggggcctgcggaccaaaggtccgcagacggcagagctctgctctgccggccccaccgagcgagcgagcgcgcatagagggagtggccaa

SEQ ID NO: 114 - DNA, 2214 bp, Artificial Sequence; identical to SEQ ID NO: 109
  Synthetic polynucleotide

SEQ ID NO: 115 - protein, 737 aa, Artificial Sequence; identical to SEQ ID NO: 111
  Synthetic polypeptide

SEQ ID NO: 116 - DNA, 2217 bp, Artificial Sequence
  Synthetic polynucleotide
atggctgccgatggttatcttccagattggctcgaggacaacctctctgagggcattcgcgagtggtgggcgctgaaacctggagccccgaagcccaaagccaaccagcaaaagcaggacgacggccggggtctggtgcttcctggctacaagtacctcggacccttcaacggactcgacaagggggagcccgtcaacgcggcggacgcagcggccctcgagcacgacaaggcctacgaccagcagctgcaggcgggtgacaatccgtacctgcggtataaccacgccgacgccgagtttcaggagcgtctgcaagaagatacgtcttttgggggcaacctcgggcgagcagtcttccaggccaagaagcgggttctcgaacctctcggtctggttgaggaaggcgctaagacggctcctggaaagaagagaccggtagagccatcaccccagcgttctccagactcctctacgggcatcggcaagaaaggccaacagcccgccagaaaaagactcaattttggtcagactggcgactcagagtcagttccagaccctcaacctctcggagaacctccagcagcgccctctggtgtgggacctaatacaatggctgcaggcggtggcgcaccaatggcagacaataacgaaggcgccgacggagtgggtagttcctcgggaaattggcattgcgattccacatggctgggcgacagagtcatcaccaccagcacccgaacctgggccctgcccacctacaacaaccacctctacaagcaaatctccaacgggacatcgggaggagccaccaacgacaacacctacttcggctacagcaccccctgggggtattttgactttaacagattccactgccacttttcaccacgtgactggcagcgactcatcaacaacaactggggattccggcccaagagactcagcttcaagctcttcaacatccaggtcaaggaggtcacgcagaatgaaggcaccaagaccatcgccaataacctcaccagcaccatccaggtgtttacggactcggagtaccagctgccgtacgttctcggctctgcccaccagggctgcctgcctccgttcccggcggacgtgttcatgattccccagtacggctacctaacactcaacaacggtagtcaggccgtgggacgctcctccttctactgcctggaatactttccttcgcagatgctgagaaccggcaacaacttccagtttacttacaccttcgaggacgtgcctttccacagcagctacgcccacagccagagcttggaccggctgatgaatcctctgattgaccagtacctgtactacttgtctcggactcaaacaacaggaggcacggcaaatacgcagactctgggcttcagccaaggtgggcctaatacaatggccaatcaggcaaagaactggctgccaggaccctgttaccgccaacaacgcgtctcaacgacaaccgggcaaaacaacaatagcaactttgcctggactgctgggaccaaataccatctgaatggaagaaattcattggctaatcctggcatcgctatggcaacacacaaagacgacgaggagcgtttttttcccagtaacgggatcctgatttttggcaaacaaaatgctgccagagacaatgcggattacagcgatgtcatgctcaccagcgaggaagaaatcaaaaccactaaccctgtggctacagaggaatacggtatcgtggcagataacttgcagcagcaaaacacggctcctcaaattggaactgtcaacagccagggggccttacccggtatggtctggcagaaccgggacgtgtacctgcagggtcccatctgggccaagattcctcacacggacggcaacttccacccgtctccgctgatgggcggctttggcctgaaacatcctccgcctcagatcctgatcaagaacacgcctgtacctgcggatcctccgaccaccttcaaccagtcaaagctgaactctttcatcacgcaatacagcaccggacaggtcagcgtggaaattgaatgggagctgcagaaggaaaacagcaagcgctggaaccccgagatccagtacacctccaactactacaaatctacaagtgtggactttgctgttaatacagaaggcgtgtactctgaaccccgccccattggcacccgttacctcacccgtaatctgtaa

SEQ ID NO: 117 - DNA, 2213 bp, Adeno-associated virus 8
atggctgccgatggttatcttccagattggctcgaggacaacctctctgagggcattcgcgagtggtgggcgctgaaacctggagccccgaagcccaaagccaaccagcaaaagcaggacgacggccggggtctggtgcttcctggctacaagtacctcggacccttcaacggactcgacaagggggagcccgtcaacgcggcggacgcagcggccctcgagcacgacaaggcctacgaccagcagctgcaggcgggtgacaatccgtacctgcggtataaccacgccgacgccgagtttcaggagcgtctgcaagaagatacgtcttttgggggcaacctcgggcgagcagtcttccaggccaagaagcgggttctcgaacctctcggtctggttgaggaaggcgctaagacggctcctggaaagaagagaccggtagagccatcaccccagcgttctccagactcctctacgggcatcggcaagaaaggccaacagcccgccagaaaaagactcaattttggtcagactggcgactcagagtcagttccagaccctcaacctctcggagaacctccagcagcgccctctggtgtgggacctaatacaatggctgcaggcggtggcgcaccaatggcagacaataacgaaggcgccgacggagtgggtagttcctcgggaaattggcattgcgattccacatggctgggcgacagagtcatcaccaccagcacccgaacctgggccctgcccacctacaacaaccacctctacaagcaaatctccaacgggacatcgggaggagccaccaacgacaacacctacttcggctacagcaccccctgggggtattttgactttaacagattccactgccacttttcaccacgtgactggcagcgactcatcaacaacaactggggattccggcccaagagactcagcttcaagctcttcaacatccaggtcaaggaggtcacgcagaatgaaggcaccaagaccatcgccaataacctcaccagcaccatccaggtgtttacggactcggagtaccagctgccgtacgttctcggctctgcccaccagggctgcctgcctccgttcccggcggacgtgttcatgattccccagtacggctacctaacactcaacaacggtagtcaggccgtgggacgctcctccttctactgcctggaatactttccttcgcagatgctgagaaccggcaacaacttccagtttacttacaccttcgaggacgtgcctttccacagcagctacgcccacagccagagcttggaccggctgatgaatcctctgattgaccagtacctgtactacttgtctcggactcaaacaacaggaggcacggcaaatacgcagactctgggcttcagccaaggtgggcctaatacaatggccaatcaggcaaagaactggctgccaggaccctgttaccgccaacaacgcgtctcaacgacaaccgggcaaaacaacaatagcaactttgcctggactgctgggaccaaataccatctgaatggaagaaattcattggctaatcctggcatcgctatggcaacacacaaagacgacgaggagcgtttttttcccagtaacgggatcctgatttttggcaaacaaaatgctgccagagacaatgcggattacagcgatgtcatgctcaccagcgaggaagaaatcaaaaccactaaccctgtggctacagaggaatacggtatcgtggcagataacttgcagcagcaaaacacggctcctcaaattggaactgtcaacagccagggggccttacccggtatggtctggcagaaccgggacgtgtacctgcagggtcccatctgggccaagattcctcacacggacggcaacttccacccgtctccgctgatgggcggctttggcctgaaacatcctccgcctcagatcctgatcaagaacacgcctgtacctgcggatcctccgaccaccttcaaccagtcaaagctgaactctttcatcacgcaatacagcaccggacaggtcagcgtggaaattgaatgggagctgcagaaggaaaacagcaagcgctggaaccccgagatccagtacacctccaactactacaaatctacaagtgtggactttgctgtaatacagaaggcgtgtactctgaaccccgccccattggcacccgttacctcacccgtaatctg

SEQ ID NO: 118 - DNA, 4393 bp, Adeno-associated virus 8
cagagagggagtggccaactccatcactaggggtagcgcgaagcgcctcccacgctgccgcgtcagcgctgacgtaaattacgtcataggggagtggtcctgtattagctgtcacgtgagtgcttttgcggcattttgcgacaccacgtggccatttgaggtatatatggccgagtgagcgagcaggatctccattttgaccgcgaaatttgaacgagcagcagccatgccgggcttctacgagatcgtgatcaaggtgccgagcgacctggacgagcacctgccgggcatttctgactcgtttgtgaactgggtggccgagaaggaatgggagctgcccccggattctgacatggatcggaatctgatcgagcaggcacccctgaccgtggccgagaagctgcagcgcgacttcctggtccaatggcgccgcgtgagtaaggccccggaggccctcttctttgttcagttcgagaagggcgagagctactttcacctgcacgttctggtcgagaccacgggggtcaagtccatggtgctaggccgcttcctgagtcagattcgggaaaagcttggtccagaccatctacccgcggggtcgagccccaccttgcccaactggttcgcggtgaccaaagacgcggtaatggcgccggcgggggggaacaaggtggtggacgagtgctacatccccaactacctcctgcccaagactcagcccgagctgcagtgggcgtggactaacatggaggagtatataagcgcgtgcttgaacctggccgagcgcaaacggctcgtggcgcagcacctgacccacgtcagccagacgcaggagcagaacaaggagaatctgaaccccaattctgacgcgcccgtgatcaggtcaaaaacctccgcgcgctatatggagctggtcgggtggctggtggaccggggcatcacctccgagaagcagtggatccaggaggaccaggcctcgtacatctccttcaacgccgcctccaactcgcggtcccagatcaaggccgcgctggacaatgccggcaagatcatggcgctgaccaaatccgcgcccgactacctggtggggccctcgctgcccgcggacattacccagaaccgcatctaccgcatcctcgctctcaacggctacgaccctgcctacgccggctccgtctttctcggctgggctcagaaaaagttcgggaaacgcaacaccatctggctgtttggacccgccaccaccggcaagaccaacattgcggaagccatcgcccacgccgtgcccttctacggctgcgtcaactggaccaatgagaactttcccttcaatgattgcgtcgacaagatggtgatctggtgggaggagggcaagatgacggccaaggtcgtggagtccgccaaggccattctcggcggcagcaaggtgcgcgtggaccaaaagtgcaagtcgtccgcccagatcgaccccacccccgtgatcgtcacctccaacaccaacatgtgcgccgtgattgacgggaacagcaccaccttcgagcaccagcagcctctccaggaccggatgtttaagttcgaactcacccgccgtctggagcacgactttggcaaggtgacaaagcaggaagtcaaagagttcttccgctgggccagtgatcacgtgaccgaggtggcgcatgagttttacgtcagaaagggcggagccagcaaaagacccgcccccgatgacgcggataaaagcgagcccaagcgggcctgcccctcagtcgcggatccatcgacgtcagacgcggaaggagctccggtggactttgccgacaggtaccaaaacaaatgttctcgtcacgcgggcatgcttcagatgctgtttccctgcaaaacgtgcgagagaatgaatcagaatttcaacatttgcttcacacacggggtcagagactgctcagagtgtttccccggcgtgtcagaatctcaaccggtcgtcagaaagaggacgtatcggaaactctgtgcgattcatcatctgctggggcgggctcccgagattgcttgctcggcctgcgatctggtcaacgtggacctggatgactgtgtttctgagcaataaatgacttaaaccaggtatggctgccgatggttatcttccagattggctcgaggacaacctctctgagggcattcgcgagtggtgggcgctgaaacctggagccccgaagcccaaagccaaccagcaaaagcaggacgacggccggggtctggtgcttcctggctacaagtacctcggacccttcaacggactcgacaagggggagcccgtcaacgcggcggacgcagcggccctcgagcacgacaaggcctacgaccagcagctgcaggcgggtgacaatccgtacctgcggtataaccacgccgacgccgagtttcaggagcgtctgcaagaagatacgtcttttgggggcaacctcgggcgagcagtcttccaggccaagaagcgggttctcgaacctctcggtctggttgaggaaggcgctaagacggctcctggaaagaagagaccggtagagccatcaccccagcgttctccagactcctctacgggcatcggcaagaaaggccaacagcccgccagaaaaagactcaattttggtcagactggcgactcagagtcagttccagaccctcaacctctcggagaacctccagcagcgccctctggtgtgggacctaatacaatggctgcaggcggtggcgcaccaatggcagacaataacgaaggcgccgacggagtgggtagttcctcgggaaattggcattgcgattccacatggctgggcgacagagtcatcaccaccagcacccgaacctgggccctgcccacctacaacaaccacctctacaagcaaatctccaacgggacatcgggaggagccaccaacgacaacacctacttcggctacagcaccccctgggggtattttgactttaacagattccactgccacttttcaccacgtgactggcagcgactcatcaacaacaactggggattccggcccaagagactcagcttcaagctcttcaacatccaggtcaaggaggtcacgcagaatgaaggcaccaagaccatcgccaataacctcaccagcaccatccaggtgtttacggactcggagtaccagctgccgtacgttctcggctctgcccaccagggctgcctgcctccgttcccggcggacgtgttcatgattccccagtacggctacctaacactcaacaacggtagtcaggccgtgggacgctcctccttctactgcctggaatactttccttcgcagatgctgagaaccggcaacaacttccagtttacttacaccttcgaggacgtgcctttccacagcagctacgcccacagccagagcttggaccggctgatgaatcctctgattgaccagtacctgtactacttgtctcggactcaaacaacaggaggcacggcaaatacgcagactctgggcttcagccaaggtgggcctaatacaatggccaatcaggcaaagaactggctgccaggaccctgttaccgccaacaacgcgtctcaacgacaaccgggcaaaacaacaatagcaactttgcctggactgctgggaccaaataccatctgaatggaagaaattcattggctaatcctggcatcgctatggcaacacacaaagacgacgaggagcgtttttttcccagtaacgggatcctgatttttggcaaacaaaatgctgccagagacaatgcggattacagcgatgtcatgctcaccagcgaggaagaaatcaaaaccactaaccctgtggctacagaggaatacggtatcgtggcagataacttgcagcagcaaaacacggctcctcaaattggaactgtcaacagccagggggccttacccggtatggtctggcagaaccgggacgtgtacctgcagggtcccatctgggccaagattcctcacacggacggcaacttccacccgtctccgctgatgggcggctttggcctgaaacatcctccgcctcagatcctgatcaagaacacgcctgtacctgcggatcctccgaccaccttcaaccagtcaaagctgaactctttcatcacgcaatacagcaccggacaggtcagcgtggaaattgaatgggagctgcagaaggaaaacagcaagcgctggaaccccgagatccagtacacctccaactactacaaatctacaagtgtggactttgctgttaatacagaaggcgtgtactctgaaccccgccccattggcacccgttacctcacccgtaatctgtaattgcctgttaatcaataaaccggttgattcgtttcagttgaactttggtctctgcg

SEQ ID NO: 119 - protein, 738 aa, Adeno-associated virus 8; identical to SEQ ID NO: 110

SEQ ID NO: 120 - protein, 737 aa, Adeno-associated virus 8
MAADGYLPDWLEDNLSEGIREWWALKPGAPKPKANQQKQDDGRGLVLPGYKYLGPFNGLDKGEPVNAADAAALEHDKAYDQQLQAGDNPYLRYNHADAEFQERLQEDTSFGGNLGRAVFQAKKRVLEPLGLVEEGAKTAPGKKRPVEPSPQRSPDSSTGIGKKGQQPARKRLNFGQTGDSESVPDPQPLGEPPAAPSGVGPNTMAAGGGAPMADNNEGADGVGSSSGNWHCDSTWLGDRVITTSTRTWALPTYNNHLYKQISNGTSGGATNDNTYFGYSTPWGYFDFNRFHCHFSPRDWQRLINNNWGFRPKRLSFKLFNIQVKEVTQNEGTKTIANNLTSTIQVFTDSEYQLPYVLGSAHQGCLPPFPADVFMIPQYGYLTLNNGSQAVGRSSFYCLEYFPSQMLRTGNNFQFTYTFEDVPFHSSYAHSQSLDRLMNPLIDQYLYYLSRTQTTGGTANTQTLGFSQGGPNTMANQAKNWLPGPCYRQQRVSTTTGQNNNSNFAWTAGTKYHLNGRNSLANPGIAMATHKDDEERFFPSNGILIFGKQNAARDNADYSDVMLTSEEEIKTTNPVATEEYGIVADNLQQQNTAPQIGTVNSQGALPGMVWQNRDVYLQGPIWAKIPHTDGNFHPSPLMGGFGLKHPPPQILIKNTPVPADPPTTFNQSKLNSFITQYSTGQVSVEIEWELQKENSKRWNPEIQYTSNYYKSTSVDFAVIQKACTLNPAPLAPVTSPVI

SEQ ID NO: 121 - DNA, 2217 bp, Artificial Sequence; identical to SEQ ID NO: 116
  Synthetic polynucleotide

SEQ ID NO: 122 - DNA, 2214 bp, Artificial Sequence
  Synthetic polynucleotide
atggctgccgatggttatcttccagattggctcgaggacaacctctctgagggcattcgcgagtggtgggcgctgaaacctggagccccgaagcccaaagccaaccagcaaaagcaggacgacggccggggtctggtgcttcctggctacaagtacctcggacccttcaacggactcgacaagggggagcccgtcaacgcggcggacgcagcggccctcgagcacgacaaggcctacgaccagcagctgcaggcgggtgacaatccgtacctgcggtataaccacgccgacgccgagtttcaggagcgtctgcaagaagatacgtcttttgggggcaacctcgggcgagcagtcttccaggccaagaagcgggttctcgaacctctcggtctggttgaggaaggcgctaagacggctcctggaaagaagagaccggtagagccatcaccccagcgttctccagactcctctacgggcatcggcaagaaaggccaacagcccgccagaaaaagactcaattttggtcagactggcgactcagagtcagttccagaccctcaacctctcggagaacctccagcagcgccctctggtgtgggacctaatacaatggctgcaggcggtggcgcaccaatggcagacaataacgaaggcgccgacggagtgggtagttcctcgggaaattggcattgcgattccacatggctgggcgacagagtcatcaccaccagcacccgaacctgggccctgcccacctacaacaaccacctctacaagcaaatctccaacgggacatcgggaggagccaccaacgacaacacctacttcggctacagcaccccctgggggtattttgactttaacagattccactgccacttttcaccacgtgactggcagcgactcatcaacaacaactggggattccggcccaagagactcagcttcaagctcttcaacatccaggtcaaggaggtcacgcagaatgaaggcaccaagaccatcgccaataacctcaccagcaccatccaggtgtttacggactcggagtaccagctgccgtacgttctcggctctgcccaccagggctgcctgcctccgttcccggcggacgtgttcatgattccccagtacggctacctaacactcaacaacggtagtcaggccgtgggacgctcctccttctactgcctggaatactttccttcgcagatgctgagaaccggcaacaacttccagtttacttacaccttcgaggacgtgcctttccacagcagctacgcccacagccagagcttggaccggctgatgaatcctctgattgaccagtacctgtactacttgtctcggactcaaacaacaggaggcacggcaaatacgcagactctgggcttcagccaaggtgggcctaatacaatggccaatcaggcaaagaactggctgccaggaccctgttaccgccaacaacgcgtctcaacgacaaccgggcaaaacaacaatagcaactttgcctggactgctgggaccaaataccatctgaatggaagaaattcattggctaatcctggcatcgctatggcaacacacaaagacgacgaggagcgtttttttcccagtaacgggatcctgatttttggcaaacaaaatgctgccagagacaatgcggattacagcgatgtcatgctcaccagcgaggaagaaatcaaaaccactaaccctgtggctacagaggaatacggtatcgtggcagataacttgcctgagcggacggcgatgagtcttccgggaactgtcaacagccagggggccttacccggtatggtctggcagaaccgggacgtgtacctgcagggtcccatctgggccaagattcctcacacggacggcaacttccacccgtctccgctgatgggcggctttggcctgaaacatcctccgcctcagatcctgatcaagaacacgcctgtacctgcggatcctccgaccaccttcaaccagtcaaagctgaactctttcatcacgcaatacagcaccggacaggtcagcgtggaaattgaatgggagctgcagaaggaaaacagcaagcgctggaaccccgagatccagtacacctccaactactacaaatctacaagtgtggactttgctgttaatacagaaggcgtgtactctgaaccccgccccattggcacccgttacctcacccgtaatctg

SEQ ID NO: 123 - protein, 738 aa, Artificial Sequence
  Synthetic polypeptide
MAADGYLPDWLEDNLSEGIREWWALKPGAPKPKANQQKQDDGRGLVLPGYKYLGPFNGLDKGEPVNAADAAALEHDKAYDQQLQAGDNPYLRYNHADAEFQERLQEDTSFGGNLGRAVFQAKKRVLEPLGLVEEGAKTAPGKKRPVEPSPQRSPDSSTGIGKKGQQPARKRLNFGQTGDSESVPDPQPLGEPPAAPSGVGPNTMAAGGGAPMADNNEGADGVGSSSGNWHCDSTWLGDRVITTSTRTWALPTYNNHLYKQISNGTSGGATNDNTYFGYSTPWGYFDFNRFHCHFSPRDWQRLINNNWGFRPKRLSFKLFNIQVKEVTQNEGTKTIANNLTSTIQVFTDSEYQLPYVLGSAHQGCLPPFPADVFMIPQYGYLTLNNGSQAVGRSSFYCLEYFPSQMLRTGNNFQFTYTFEDVPFHSSYAHSQSLDRLMNPLIDQYLYYLSRTQTTGGTANTQTLGFSQGGPNTMANQAKNWLPGPCYRQQRVSTTTGQNNNSNFAWTAGTKYHLNGRNSLANPGIAMATHKDDEERFFPSNGILIFGKQNAARDNADYSDVMLTSEEEIKTTNPVATEEYGIVADNLPERTAMSLPGTVNSQGALPGMVWQNRDVYLQGPIWAKIPHTDGNFHPSPLMGGFGLKHPPPQILIKNTPVPADPPTTFNQSKLNSFITQYSTGQVSVEIEWELQKENSKRWNPEIQYTSNYYKSTSVDFAVNTEGVYSEPRPIGTRYLTRNL

SEQ ID NO: 124 - DNA, 2214 bp, Artificial Sequence
  Synthetic polynucleotide
atggctgccgatggttatcttccagattggctcgaggacaacctctctgagggcattcgcgagtggtgggcgctgaaacctggagccccgaagcccaaagccaaccagcaaaagcaggacgacggccggggtctggtgcttcctggctacaagtacctcggacccttcaacggactcgacaagggggagcccgtcaacgcggcggacgcagcggccctcgagcacgacaaggcctacgaccagcagctgcaggcgggtgacaatccgtacctgcggtataaccacgccgacgccgagtttcaggagcgtctgcaagaagatacgtcttttgggggcaacctcgggcgagcagtcttccaggccaagaagcgggttctcgaacctctcggtctggttgaggaaggcgctaagacggctcctggaaagaagagaccggtagagccatcaccccagcgttctccagactcctctacgggcatcggcaagaaaggccaacagcccgccagaaaaagactcaattttggtcagactggcgactcagagtcagttccagaccctcaacctctcggagaacctccagcagcgccctctggtgtgggacctaatacaatggctgcaggcggtggcgcaccaatggcagacaataacgaaggcgccgacggagtgggtagttcctcgggaaattggcattgcgattccacatggctgggcgacagagtcatcaccaccagcacccgaacctgggccctgcccacctacaacaaccacctctacaagcaaatctccaacgggacatcgggaggagccaccaacgacaacacctacttcggctacagcaccccctgggggtattttgactttaacagattccactgccacttttcaccacgtgactggcagcgactcatcaacaacaactggggattccggcccaagagactcagcttcaagctcttcaacatccaggtcaaggaggtcacgcagaatgaaggcaccaagaccatcgccaataacctcaccagcaccatccaggtgtttacggactcggagtaccagctgccgtacgttctcggctctgcccaccagggctgcctgcctccgttcccggcggacgtgttcatgattccccagtacggctacctaacactcaacaacggtagtcaggccgtgggacgctcctccttctactgcctggaatactttccttcgcagatgctgagaaccggcaacaacttccagtttacttacaccttcgaggacgtgcctttccacagcagctacgcccacagccagagcttggaccggctgatgaatcctctgattgaccagtacctgtactacttgtctcggactcaaacaacaggaggcacggcaaatacgcagactctgggcttcagccaaggtgggcctaatacaatggccaatcaggcaaagaactggctgccaggaccctgttaccgccaacaacgcgtctcaacgacaaccgggcaaaacaacaatagcaactttgcctggactgctgggaccaaataccatctgaatggaagaaattcattggctaatcctggcatcgctatggcaacacacaaagacgacgaggagcgtttttttcccagtaacgggatcctgatttttggcaaacaaaatgctgccagagacaatgcggattacagcgatgtcatgctcaccagcgaggaagaaatcaaaaccactaaccctgtggctacagaggaatacggtatcgtggcagataacttgagttttagtcgtgcggttctttgtgatggaactgtcaacagccagggggccttacccggtatggtctggcagaaccgggacgtgtacctgcagggtcccatctgggccaagattcctcacacggacggcaacttccacccgtctccgctgatgggcggctttggcctgaaacatcctccgcctcagatcctgatcaagaacacgcctgtacctgcggatcctccgaccaccttcaaccagtcaaagctgaactctttcatcacgcaatacagcaccggacaggtcagcgtggaaattgaatgggagctgcagaaggaaaacagcaagcgctggaaccccgagatccagtacacctccaactactacaaatctacaagtgtggactttgctgttaatacagaaggcgtgtactctgaaccccgccccattggcacccgttacctcacccgtaatctg

SEQ ID NO: 125 - protein, 738 aa, Artificial Sequence
  Synthetic polypeptide
MAADGYLPDWLEDNLSEGIREWWALKPGAPKPKANQQKQDDGRGLVLPGYKYLGPFNGLDKGEPVNAADAAALEHDKAYDQQLQAGDNPYLRYNHADAEFQERLQEDTSFGGNLGRAVFQAKKRVLEPLGLVEEGAKTAPGKKRPVEPSPQRSPDSSTGIGKKGQQPARKRLNFGQTGDSESVPDPQPLGEPPAAPSGVGPNTMAAGGGAPMADNNEGADGVGSSSGNWHCDSTWLGDRVITTSTRTWALPTYNNHLYKQISNGTSGGATNDNTYFGYSTPWGYFDFNRFHCHFSPRDWQRLINNNWGFRPKRLSFKLFNIQVKEVTQNEGTKTIANNLTSTIQVFTDSEYQLPYVLGSAHQGCLPPFPADVFMIPQYGYLTLNNGSQAVGRSSFYCLEYFPSQMLRTGNNFQFTYTFEDVPFHSSYAHSQSLDRLMNPLIDQYLYYLSRTQTTGGTANTQTLGFSQGGPNTMANQAKNWLPGPCYRQQRVSTTTGQNNNSNFAWTAGTKYHLNGRNSLANPGIAMATHKDDEERFFPSNGILIFGKQNAARDNADYSDVMLTSEEEIKTTNPVATEEYGIVADNLSFSRAVLCDGTVNSQGALPGMVWQNRDVYLQGPIWAKIPHTDGNFHPSPLMGGFGLKHPPPQILIKNTPVPADPPTTFNQSKLNSFITQYSTGQVSVEIEWELQKENSKRWNPEIQYTSNYYKSTSVDFAVNTEGVYSEPRPIGTRYLTRNL

SEQ ID NO: 126 - DNA, 4385 bp, Adeno-associated virus 9
cagagagggagtggccaactccatcactaggggtaatcgcgaagcgcctcccacgctgccgcgtcagcgctgacgtagattacgtcataggggagtggtcctgtattagctgtcacgtgagtgcttttgcgacattttgcgacaccacatggccatttgaggtatatatggccgagtgagcgagcaggatctccattttgaccgcgaaatttgaacgagcagcagccatgccgggcttctacgagattgtgatcaaggtgccgagcgacctggacgagcacctgccgggcatttctgactcttttgtgaactgggtggccgagaaggaatgggagctgcccccggattctgacatggatcggaatctgatcgagcaggcacccctgaccgtggccgagaagctgcagcgcgacttcctggtccaatggcgccgcgtgagtaaggccccggaggccctcttctttgttcagttcgagaagggcgagagctactttcacctgcacgttctggtcgagaccacgggggtcaagtccatggtgctaggccgcttcctgagtcagattcgggagaagctggtccagaccatctaccgcgggatcgagccgaccctgcccaactggttcgcggtgaccaagacgcgtaatggcgccggcggggggaacaaggtggtggacgagtgctacatccccaactacctcctgcccaagactcagcccgagctgcagtgggcgtggactaacatggaggagtatataagcgcgtgcttgaacctggccgagcgcaaacggctcgtggcgcagcacctgacccacgtcagccagacgcaggagcagaacaaggagaatctgaaccccaattctgacgcgcccgtgatcaggtcaaaaacctccgcgcgctacatggagctggtcgggtggctggtggaccggggcatcacctccgagaagcagtggatccaggaggaccaggcctcgtacatctccttcaacgccgcctccaactcgcggtcccagatcaaggccgcgctggacaatgccggcaagatcatggcgctgaccaaatccgcgcccgactacctggtaggcccttcacttccggtggacattacgcagaaccgcatctaccgcatcctgcagctcaacggctacgaccctgcctacgccggctccgtctttctcggctgggcacaaaagaagttcgggaaacgcaacaccatctggctgtttgggccggccaccacgggaaagaccaacatcgcagaagccattgcccacgccgtgcccttctacggctgcgtcaactggaccaatgagaactttcccttcaacgattgcgtcgacaagatggtgatctggtgggaggagggcaagatgacggccaaggtcgtggagtccgccaaggccattctcggcggcagcaaggtgcgcgtggaccaaaagtgcaagtcgtccgcccagatcgaccccactcccgtgatcgtcacctccaacaccaacatgtgcgccgtgattgacgggaacagcaccaccttcgagcaccagcagcctctccaggaccggatgtttaagttcgaactcacccgccgtctggagcacgactttggcaaggtgacaaagcaggaagtcaaagagttcttccgctgggccagtgatcacgtgaccgaggtggcgcatgagttttacgtcagaaagggcggagccagcaaaagacccgcccccgatgacgcggataaaagcgagcccaagcgggcctgcccctcagtcgcggatccatcgacgtcagacgcggaaggagctccggtggactttgccgacaggtaccaaaacaaatgttctcgtcacgcgggcatgcttcagatgctgcttccctgcaaaacgtgcgagagaatgaatcagaatttcaacatttgcttcacacacggggtcagagactgctcagagtgtttccccggcgtgtcagaatctcaaccggtcgtcagaaagaggacgtatcggaaactctgtgcgattcatcatctgctggggcgggctcccgagattgcttgctcggcctgcgatctggtcaacgtggacctggatgactgtgtttctgagcaataaatgacttaaaccaggtatggctgccgatggttatcttccagattggctcgaggacaacctctctgagggcattcgcgagtggtgggcgctgaaacctggagccccgaagcccaaagccaaccagcaaaagcaggacgacggccggggtctggtgcttcctggctacaagtacctcggacccttcaacggactcgacaagggggagcccgtcaacgcggcggacgcagcggccctcgagcacggcaaggcctacgaccagcagctgcaggcgggtgacaatccgtacctgcggtataaccacgccgacgccgagtttcaggagcgtctgcaagaagatacgtcttttgggggcaacctcgggcgagcagtcttccaggccaagaagcgggttctcgaacctctcggtctggttgaggaaggcgctaagacggctcctggaaagaagagaccggtagagccatcaccccagcgttctccagactcctctacgggcatcggcaagaaaggccaacagcccgccagaaaaagactcaattttggtcagactggcgactcagagtcagttccagaccctcaacctctcggagaacctccagcagcgccctctggtgtgggacctaatacaatggctgcaggcggtggcgcaccaatggcagacaataacgaaggcgccgacggagtgggtaattcctcgggaaattggcattgcgattccacatggctgggggacagagtcatcaccaccagcacccgaacctgggcattgcccacctacaacaaccacctctacaagcaaatctccaatggaacatcgggaggaagcaccaacgacaacacctactttggctacagcaccccctgggggtattttgacttcaacagattccactgccacttctcaccacgtgactggcagcgactcatcaacaacaactggggattccggccaaagagactcaacttcaagctgttcaacatccaggtcaaggaggttacgacgaacgaaggcaccaagaccatcgccaataaccttaccagcaccgtccaggtctttacggactcggagtaccagctaccgtacgtcctaggctctgcccaccaaggatgcctgccaccgtttcctgcagacgtcttcatggttcctcagtacggctacctgacgctcaacaatggaagtcaagcgttaggacgttcttctttctactgtctggaatacttcccttctcagatgctgagaaccggcaacaactttcagttcagctacactttcgaggacgtgcctttccacagcagctacgcacacagccagagtctagatcgactgatgaaccccctcatcgaccagtacctatactacctggtcagaacacagacaactggaactgggggaactcaaactttggcattcagccaagcaggccctagctcaatggccaatcaggctagaaactgggtacccgggccttgctaccgtcagcagcgcgtctccacaaccaccaaccaaaataacaacagcaactttgcgtggacgggagctgctaaattcaagctgaacgggagagactcgctaatgaatcctggcgtggctatggcatcgcacaaagacgacgaggaccgcttctttccatcaagtggcgttctcatatttggcaagcaaggagccgggaacgatggagtcgactacagccaggtgctgattacagatgaggaagaaattaaagccaccaaccctgtagccacagaggaatacggagcagtggccatcaacaaccaggccgctaacacgcaggcgcaaactggacttgtgcataaccagggagttattcctggtatggtctggcagaaccgggacgtgtacctgcagggccctatttgggctaaaatacctcacacagatggcaactttcacccgtctcctctgatgggtggatttggactgaaacacccacctccacagattctaattaaaaatacaccagtgccggcagatcctcctcttaccttcaatcaagccaagctgaactctttcatcacgcagtacagcacgggacaagtcagcgtggaaatcgagtgggagctgcagaaagaaaacagcaagcgctggaatccagagatccagtatacttcaaactactacaaatctacaaatgtggactttgctgtcaataccaaaggtgtttactctgagcctcgccccattggtactcgttacctcacccgtaatttgtaattgcctgttaatcaataaaccggttaattcgtttcagttgaactttggtctctgcg

SEQ ID NO: 127 - DNA, 4382 bp, Adeno-associated virus 9
cagagagggagtggccaactccatcactaggggtaatcgcgaagcgcctcccacgctgccgcgtcagcgctgacgtagattacgtcataggggagtggtcctgtattagctgtcacgtgagtgcttttgcgacattttgcgacaccacatggccatttgaggtatatatggccgagtgagcgagcaggatctccattttgaccgcgaaatttgaacgagcagcagccatgccgggcttctacgagattgtgatcaaggtgccgagcgacctggacgagcacctgccgggcatttctgactcttttgtgaactgggtggccgagaaggaatgggagctgcccccggattctgacatggatcggaatctgatcgagcaggcacccctgaccgtggccgagaagctgtagcgcgacttcctggtccaatggcgccgcgtgagtaaggccccggaggccctcttctttgttcagttcgagaagggcgagagctactttcacctgcacgttctggtcgagaccacgggggtcaagtccatggtgctaggccgcttcctgagtcagattcgggagaagctggtccagaccatctaccgcgggatcgagccgaccctgcccaactggttcgcggtgaccaagacgcgtaatggcgccggcggggggaacaaggtggtggacgagtgctacatccccaactacctcctgcccaagactcagcccgagctgcagtgggcgtggactaacatggaggagtatataagcgcgtgcttgaacctggccgagcgcaaacggctcgtggcgcagcacctgacccacgtcagccagacgcaggagcagaacaaggagaatctgaaccccaattctgacgcgcccgtgatcaggtcaaaaacctccgcgcgctacatggagctggtcgggtggctggtggaccggggcatcacctccgagaagcagtggatccaggaggaccaggcctcgtacatctccttcaacgccgcctccaactcgcggtcccagatcaaggccgcgctggacaatgccggcaagatcatggcgctgaccaaatccgcgcccgactacctggtaggcccttcacttccggtggacattacgcagaaccgcatctaccgcatcctgcagctcaacggctacgaccctgcctacgccggctccgtctttctcggctgggcacaaaagaagttcgggaaacgcaacaccatctggctgtttgggccggccaccacgggaaagaccaacatcgcagaagccattgcccacgccgtgcccttctacggctgcgtcaactggaccaatgagaactttcccttcaacgattgcgtcgacaagatggtgatctggtgggaggagggcaagatgacggccaaggtcgtggagtccgccaaggccattctcggcggcagcaaggtgcgcgtggaccaaaagtgcaagtcgtccgcccagatcgaccccactcccgtgatcgtcacctccaacaccaacatgtgcgccgtgattgacgggaacagcaccaccttcgagcaccagcagcctctccaggaccggatgtttaagttcgaactcacccgccgtctggagcacgactttggcaaggtgacaaagcaggaagtcaaagagttcttccgctgggccagtgatcacgtgaccgaggtggcgcatgagttttacgtcagaaagggcggagccagcaaaagacccgcccccgatgacgcggataaaagcgagcccaagcgggcctgcccctcagtcgcggatccatcgacgtcagacgcggaaggagctccggtggactttgccgacaggtaccaaaacaaatgttctcgtcacgcgggcatgcttcagatgctgcttccctgcaaaacgtgcgagagaatgaatcagaatttcaacatttgcttcacacacggggtcagagactgctcagagtgtttccccggcgtgtcagaatctcaaccggtcgtcagaaagaggacgtatcggaaactctgtgcgattcatcatctgctggggcgggctcccgagattgcttgctcggcctgcgatctggtcaacgtggacctggatgactgtgtttctgagcaataaatgacttaaaccaggtatggctgccgatggttatcttccagattggctcgaggacaacctctctgagggcattcgcgagtggtgggacctgaaacctggagccccgaaacccaaagccaaccagcaaaagcaggacgacggccggggtctggtgcttcctggctacaagtacctcggacccttcaacggactcgacaagggggagcccgtcaacgcggcggacgcagcggccctcgagcacgacaaggcctacgaccagcagctcaaagcgggtgacaatccgtacctgcggtataaccacgccgacgccgagtttcaggagcgtctgcaagaagatacgtcttttgggggcaacctcgggcgagcagtcttccaggccaagaagcgggttctcgaacctctcggtctggttgaggaaggcgctaagacggctcctggaaagaagagaccggtagagcagtcaccccaagaaccagactcatcctcgggcatcggcaaatcaggccagcagcccgctaaaaagagactcaattttggtcagactggcgactcagagtcagtccccgacccacaacctctcggagaacctccagaagccccctcaggtctgggacctaatacaatggcttcaggcggtggcgctccaatggcagacaataacgaaggcgccgacggagtgggtaattcctcgggaaattggcattgcgattccacatggctgggggacagagtcatcaccaccagcacccgaacctgggcattgcccacctacaacaaccacctctacaagcaaatctccaatggaacatcgggaggaagcaccaacgacaacacctactttggctacagcaccccctgggggtattttgacttcaacagattccactgccacttctcaccacgtgactggcagcgactcatcaacaacaactggggattccggccaaagagactcaacttcaagctgttcaacatccaggtcaaggaggttacgacgaacgaaggcaccaagaccatcgccaataaccttaccagcaccgtccaggtctttacggactcggagtaccagctaccgtacgtcctaggctctgcccaccaaggatgcctgccaccgtttcctgcagacgtcttcatggttcctcagtacggctacctgacgctcaacaatggaagtcaagcgttaggacgttcttctttctactgtctggaatacttcccttctcagatgctgagaaccggcaacaactttcagttcagctacactttcgaggacgtgcctttccacagcagctacgcacacagccagagtctagatcgactgatgaaccccctcatcgaccagtacctatactacctggtcagaacacagacaactggaactgggggaactcaaactttggcattcagccaagcaggccctagctcaatggccaatcaggctagaaactgggtacccgggccttgctaccgtcagcagcgcgtctccacaaccaccaaccaaaataacaacagcaactttgcgtggacgggagctgctaaattcaagctgaacgggagagactcgctaatgaatcctggcgtggctatggcatcgcacaaagacgacgaggaccgcttctttccatcaagtggcgttctcatatttggcaagcaaggagccgggaacgatggagtcgactacagccaggtgctgattacagatgaggaagaaattaaagccaccaaccctgtagccacagaggaatacggagcagtggccatcaacaaccaggccgctaacacgcaggcgcaaactggacttgtgcataaccagggagttattcctggtatggtctggcagaaccgggacgtgtacctgcagggccctatttgggctaaaatacctcacacagatggcaactttcacccgtctcctctgatgggtggatttggactgaaacacccacctccacagattctaattaaaaatacaccagtgccggcagatcctcctcttaccttcaatcaagccaagctgaactctttcatcacgcagtacagcacgggacaagtcagcgtggaaatcgagtgggagctgcagaaagaaaacagcaagcgctggaatccagagatccagtatacttcaaactactacaaatctacaaatgtggactttgctgtcaataccgaaggtgtttactctgagcctcgccccattggtactcgttacctcacccgtaatttgtaattgcctgttaatcaataaaccggttaattcgtttcagttgaactttggtctctgcg

SEQ ID NO: 128 - protein, 736 aa, Adeno-associated virus 9
MAADGYLPDWLEDNLSEGIREWWALKPGAPQPKANQQHQDNARGLVLPGYKYLGPGNGLDKGEPVNAADAAALEHDKAYDQQLKAGDNPYLKYNHADAEFQERLKEDTSFGGNLGRAVFQAKKRLLEPLGLVEEAAKTAPGKKRPVEQSPQEPDSSAGIGKSGAQPAKKRLNFGQTGDTESVPDPQPIGEPPAAPSGVGSLTMASGGGAPVADNNEGADGVGSSSGNWHCDSQWLGDRVITTSTRTWALPTYNNHLYKQISNSTSGGSSNDNAYFGYSTPWGYFDFNRFHCHFSPRDWQRLINNNWGFRPKRLNFKLFNIQVKEVTDNNGVKTIANNLTSTVQVFTDSDYQLPYVLGSAHEGCLPPFPADVFMIPQYGYLTLNDGSQAVGRSSFYCLEYFPSQMLRTGNNFQFSYEFENVPFHSSYAHSQSLDRLMNPLIDQYLYYLSKTINGSGQNQQTLKFSVAGPSNMAVQGRNYIPGPSYRQQRVSTTVTQNNNSEFAWPGASSWALNGRNSLMNPGPAMASHKEGEDRFFPLSGSLIFGKQGTGRDNVDADKVMITNEEEIKTTNPVATESYGQVATNHQSAQAQAQTGWVQNQGILPGMVWQDRDVYLQGPIWAKIPHTDGNFHPSPLMGGFGMKHPPPQILIKNTPVPADPPTAFNKDKLNSFITQYSTGQVSVEIEWELQKENSKRWNPEIQYTSNYYKSNNVEFAVNTEGVYSEPRPIGTRYLTRNL

SEQ ID NO: 129 - protein, 736 aa, Adeno-associated virus 9
MAADGYLPDWLEDNLSEGIREWWDLKPGAPKPKANQQKQDDGRGLVLPGYKYLGPFNGLDKGEPVNAADAAALEHDKAYDQQLKAGDNPYLRYNHADAEFQERLQEDTSFGGNLGRAVFQAKKRVLEPLGLVEEGAKTAPGKKRPVEQSPQEPDSSSGIGKSGQQPAKKRLNFGQTGDSESVPDPQPLGEPPEAPSGLGPNTMASGGGAPMADNNEGADGVGNSSGNWHCDSTWLGDRVITTSTRTWALPTYNNHLYKQISNGTSGGSTNDNTYFGYSTPWGYFDFNRFHCHFSPRDWQRLINNNWGFRPKRLNFKLFNIQVKEVTTNEGTKTIANNLTSTVQVFTDSEYQLPYVLGSAHQGCLPPFPADVFMVPQYGYLTLNNGSQALGRSSFYCLEYFPSQMLRTGNNFQFSYTFEDVPFHSSYAHSQSLDRLMNPLIDQYLYYLVRTQTTGTGGTQTLAFSQAGPSSMANQARNWVPGPCYRQQRVSTTTNQNNNSNFAWTGAAKFKLNGRDSLMNPGVAMASHKDDEDRFFPSSGVLIFGKQGAGNDGVDYSQVLITDEEEIKATNPVATEEYGAVAINNQAANTQAQTGLVHNQGVIPGMVWQNRDVYLQGPIWAKIPHTDGNFHPSPLMGGFGLKHPPPQILIKNTPVPADPPLTFNQAKLNSFITQYSTGQVSVEIEWELQKENSKRWNPEIQYTSNYYKSTNVDFAVNTEGVYSEPRPIGTRYLTRNL

SEQ ID NO: 130 - protein, 623 aa, Adeno-associated virus 9
MPGFYEIVIKVPSDLDEHLPGISDSFVNWVAEKEWELPPDSDMDRNLIEQAPLTVAEKLQRDFLVQWRRVSKAPEALFFVQFEKGESYFHLHVLVETTGVKSMVLGRFLSQIREKLVQTIYRGIEPTLPNWFAVTKTRNGAGGGNKVVDECYIPNYLLPKTQPELQWAWTNMEEYISACLNLAERKRLVAQHLTHVSQTQEQNKENLNPNSDAPVIRSKTSARYMELVGWLVDRGITSEKQWIQEDQASYISFNAASNSRSQIKAALDNAGKIMALTKSAPDYLVGPSLPVDITQNRIYRILQLNGYDPAYAGSVFLGWAQKKFGKRNTIWLFGPATTGKTNIAEAIAHAVPFYGCVNWTNENFPFNDCVDKMVIWWEEGKMTAKVVESAKAILGGSKVRVDQKCKSSAQIDPTPVIVTSNTNMCAVIDGNSTTFEHQQPLQDRMFKFELTRRLEHDFGKVTKQEVKEFFRWASDHVTEVAHEFYVRKGGASKRPAPDDADKSEPKRACPSVADPSTSDAEGAPVDFADRYQNKCSRHAGMLQMLLPCKTCERMNQNFNICFTHGVRDCSECFPGVSESQPVVRKRTYRKLCAIHHLLGRAPEIACSACDLVNVDLDDCVSEQ

SEQ ID NO: 131 - DNA, 2211 bp, Artificial Sequence
  Synthetic polynucleotide
atggctgccgatggttatcttccagattggctcgaggacaaccttagtgaaggaattcgcgagtggtgggctttgaaacctggagcccctcaacccaaggcaaatcaacaacatcaagacaacgctcgaggtcttgtgcttccgggttacaaataccttggacccggcaacggactcgacaagggggagccggtcaacgcagcagacgcggcggccctcgagcacgacaaggcctacgaccagcagctcaaggccggagacaacccgtacctcaagtacaaccacgccgacgccgagttccaggagcggctcaaagaagatacgtcttttgggggcaacctcgggcgagcagtcttccaggccaaaaagaggcttcttgaacctcttggtctggttgaggaagcggctaagacggctcctggaaagaagaggcctgtagagcagtctcctcaggaaccggactcctccgcgggtattggcaaatcgggtgcacagcccgctaaaaagagactcaatttcggtcagactggcgacacagagtcagtcccagaccctcaaccaatcggagaacctcccgcagccccctcaggtgtgggatctcttacaatggcttcaggtggtggcgcaccagtggcagacaataacgaaggtgccgatggagtgggtagttcctcgggaaattggcattgcgattcccaatggctgggggacagagtcatcaccaccagcacccgaacctgggccctgcccacctacaacaatcacctctacaagcaaatctccaacagcacatctggaggatcttcaaatgacaacgcctacttcggctacagcaccccctgggggtattttgacttcaacagattccactgccacttctcaccacgtgactggcagcgactcatcaacaacaactggggattccggcctaagcgactcaacttcaagctcttcaacattcaggtcaaagaggttacggacaacaatggagtcaagaccatcgccaataaccttaccagcacggtccaggtcttcacggactcagactatcagctcccgtacgtgctcgggtcggctcacgagggctgcctcccgccgttcccagcggacgttttcatgattcctcagtacgggtatctgacgcttaatgatggaagccaggccgtgggtcgttcgtccttttactgcctggaatatttcccgtcgcaaatgctaagaacgggtaacaacttccagttcagctacgagtttgagaacgtacctttccatagcagctacgctcacagccaaagcctggaccgactaatgaatccactcatcgaccaatacttgtactatctctcaaagactattaacggttctggacagaatcaacaaacgctaaaattcagtgtggccggacccagcaacatggctgtccagggaagaaactacatacctggacccagctaccgacaacaacgtgtctcaaccactgtgactcaaaacaacaacagcgaatttgcttggcctggagcttcttcttgggctctcaatggacgtaatagcttgatgaatcctggacctgctatggccagccacaaagaaggagaggaccgtttctttcctttgtctggatctttaatttttggcaaacaaggaactggaagagacaacgtggatgcggacaaagtcatgataaccaacgaagaagaaattaaaactactaacccggtagcaacggagtcctatggacaagtggccacaaaccaccagagtgcccaagcacaggcgcagaccggctgggttcaaaaccaaggaatacttccgggtatggtttggcaggacagagatgtgtacctgcaaggacccatttgggccaaaattcctcacacggacggcaactttcacccttctccgctgatgggagggtttggaatgaagcacccgcctcctcagatcctcatcaaaaacacacctgtacctgcggatcctccaacggccttcaacaaggacaagctgaactctttcatcacccagtattctactggccaagtcagcgtggagatcgagtgggagctgcagaaggaaaacagcaagcgctggaacccggagatccagtacacttccaactattacaagtctaataatgttgaatttgctgttaatactgaaggtgtatatagtgaaccccgccccattggcaccagatacctgactcgtaatctgtaa

SEQ ID NO: 132 - protein, 736 aa, Artificial Sequence; identical to SEQ ID NO: 128
  Synthetic polypeptide

SEQ ID NO: 133 - DNA, 2460 bp, Artificial Sequence
  Synthetic polynucleotide
ggtaattcctccggaaattggcattgcgattccacatggctgggcgaccgagtcattaccaccagcacccggacttgggccctgcccacctacaacaaccacctctacaagcaaatctccagccaatcgggtgccaccaacgacaaccactacttcggctacagcaccccttgggggtattttgatttcaacagattccactgccatttctcaccacgtgactggcagcgactcatcaacaacaactggggattcatggctgccgatggttatcttccagattggctcgaggacactctctctgaaggaatcagacagtggtggaagctcaaacctggcccaccaccgccgaaacctaaccaacaacaccgggacgacagtaggggtcttgtgcttcctgggtacaagtacctcggacccttcaacggactcgacaaaggagagccggtcaacgaggcagacgccgcggccctcgagcacgacaaagcctacgaccaccagctcaagcaaggggacaacccgtacctcaaatacaaccacgcggacgctgaatttcaggagcgtcttcaagaagatacgtctttcgggggcaacctcgggcgagcagtcttccaggccaaaaagagggtactcgagcctcttggtctggttgaggaagctgttaagacggctcctggaaaaaagagacctatagagcagtctcctgcagaaccggactcttcctcgggcatcggcaaatcaggccagcagcccgctaagaaaagactcaattttggtcagactggcgacacagagtcagtcccagaccctcaaccaatcggagaaccccccgcagccccctctggtgtgggatctaatacaatggcttcaggcggtggggcaccaatggcagacaataacgaaggcgccgacggagtgggtaattcctcgggaaattggcattgcgattccacatggatgggcgacagagttatcaccaccagcacaagaacctgggccctccccacctacaataatcacctctacaagcaaatctccagcgaatcgggagccaccaacgacaaccactacttcggctacagcaccccctgggggtattttgactttaacagattccactgtcacttctcaccacgtgactggcagcgactcatcaacaacaactggggatttagacccaagaaactcaatttcaagctcttcaacatccaagtcaaggaggtcacgcagaatgatggaaccacgaccatcgccaataaccttaccagcacggtgcaggtcttcacagactctgagtaccagctgccctacgtcctcggttcggctcaccagggctgccttccgccgttcccagcagacgtcttcatgattcctcagtacggctacttgactctgaacaatggcagccaagcggtaggacgttcttcattctactgtctagagtattttccctctcagatgctgaggacgggaaacaacttcaccttcagctacacttttgaagacgtgcctttccacagcagctacgcgcacagccagagtctggatcggctgatgaatcctctcattgaccagtacctgtattacctgagcaaaactcagggtacaagtggaacaacgcagcaatcgagactgcagttcagccaagctgggcctagctccatggctcagcaggccaaaaactggctaccgggacccagctaccgacagcagcgaatgtctaagacggctaatgacaacaacaacagtgaatttgcttggactgcagccaccaaatattacctgaatggaagaaattctctggtcaatcccgggcccccaatggccagtcacaaggacgatgaggaaaagtatttccccatgcacggaaatctcatctttggaaaacaaggcacaggaactaccaatgtggacattgaatcagtgcttattacagacgaagaagaaatcagaacaactaatcctgtggctacagaacaatacggacaggttgccaccaaccatcagagtcagaacaccacagcttcctatggaagtgtggacagccagggaatcttacctggaatggtgtggcaggaccgcgatgtctatcttcaaggtcccatttgggccaaaactcctcacacggacggacactttcatccttctccgctcatgggaggctttggactgaaacaccctcctccccagatcctgatcaaaaacacacctgtgccagcgaatcccgcgaccactttcactcctggaaagtttgcttcgttcattacccagtattccaccggacaggtcagcgtggaaatagagtgggagctgcagaaagaaaacagcaaacgctggaacccagaaattcagtacacctccaactacaacaagtcggtgaatgtggagtttaccgtggacgcaaacggtgtttattctgaaccccgccctattggcactcgttaccttacccggaacttg

SEQ ID NO: 134 - DNA, 3123 bp, Artificial Sequence
  Synthetic polynucleotide
gaattcgccctttctacggctgcgtcaactggaccaatgaaaactttcccttcaacgattgcgtcgacaagatggtgatctggtgggaggagggaaagatgaccgccaaggtcgtggaatctgccaaagccattctgggtggaggcaaggttcgtgtggaccagaaatgcaagtcttcggcccagatcgacccgactccggtgattgtcacctctaacaccaacatgtgcgccgtgattgacggaaactcgaccaccttcgagcaccagcagccgttgcaagaccggatgttcaaatttgaacttacccgccgtttggatcatgactttgggaaggtcaccaagcaggaagtcaaagactttttccggtgggctcaagatcacgtgactgaggtggagcatgagttctacgtcaaaaagggtggagccaagaaaaggcccgcccccgatgatgtatatataaatgagcccaagcgggcgcgcgagtcagttgcgcagccatcgacgtcagacgcggaagcttcgataaactacgcggacaggtaccaaaacaaatgttctcgtcacgtgggcatgaatctgatgctgtttccctgtcgacaatgcgaaagaatgaatcagaattcaaatatctgcttcacacacgggcaaaaagactgtttggaatgctttcccgtgtcagaatctcaacccgtttctgtcgtcagaaaaacgtatcagaaactttgttacattcatcatatcatgggaaaagtaccagacgcctgcactgcctgcgacctggtaaatgtggacttggatgactgtatttctgagcaataaatgacttaaatcaggtatggctgctgacggttatcttccagattggctcgaggacactctctctgaaggaatcagacagtggtggaagctcaaacctggcccaccaccgccgaaacctaaccaacaacaccgggacgacagtaggggtcttgtgcttcctgggtacaagtacctcggacccttcaacggactcgacaaaggagagccggtcaacgaggcagacgccgcggccctcgagcacgacaaagcctacgaccaccagctcaagcaaggggacaacccgtacctcaaatacaaccacgcggacgctgaatttcaggagcgtcttcaagaagatacgtctttcgggggcaacctcgggcgagcagtcttccaggccaaaaagagggtactcgagcctcttggtctggttgaggaagctgttaagacggctcctggaaaaaagagacctatagagcagtctcctgcagaaccggactcttcctcgggcatcggcaaatcaggccagcagcccgctaagaaaagactcaattttggtcagactggcgacacagagtcagtcccaggccctcaaccaatcggagaaccccccgcagccccctctggtgtgggatctaatacaatggcttcaggcggtggggcaccaatggcagacaataacgaaggcgccgacggagtgggtaattcctcgggaaattggcattgcgattccacatggatgggcgacagagttatcaccaccagcacaagaacctgggccctccccacctacaataatcacctctacaagcaaatctccagcgaatcgggagccaccaacgacaaccactacttcggctacagcaccccctgggggtattttgactttaacagattccactgtcacttctcaccacgtgactggcagcgactcatcaacaacaactggggatttagacccaagaaactcaatttcaagctcttcaacatccaagtcaaggaggtcacgcagaatgatggaaccacgaccatcgccaataaccttaccagcgcggtgcaggtcttcacagactctgagtaccagctgccctacgtcctcggttcggctcaccagggctgccttccgccgttcccagcagacgtcttcatgattcctcagtacggctacttgactctgaacaatggcagccaagcggtaggacgttcttcattctactgtctagagtattttccctctcagatgctgaggacgggaaacaacttcaccttcagctacacttttgaagacgtgcctttccacagcagctacgcgcacagccagagtctggatcggctgatgaatcctctcattgaccagtacctgtattacctgagcaaaactcagggtacaagtggaacaacgcagcaatcgagactgcagttcagccaagctgggcctagctccatggctcagcaggccaaaaactggctaccgggacccagctaccgacagcagcgaatgtctaagacggctaatgacaacaacaacagtgaatttgcttggactgcagccaccaaatattacctgaatggaagaaattctctggtcaatcccgggcccccagtggccagtcacaaggacgatgaggaaaagtatttccccatgcacggaaatctcatctttggaaaacaaggcacaggaactaccaatgtggacattgaatcagtgcttattacagacgaagaagaaatcagaacaactaatcctgtggctacagaacaatacggacaggttgccaccaaccatcagagtcagaacaccacagcttcctatggaagtgtggacagccagggaatcttacctggaatggtgtggcaggaccgcgatgtctatcttcaaggtcccatttgggccaaaactcctcacacggacggacactttcatccttctccgctcatgggaggctttggactgaaacaccctcctccccagatcctgatcaaaaacacacctgtgccagcgaatcccgcgaccactttcactcctggaaagtttgcttcgttcattacccagtattccacctgacaggtcagcgtggaaatagagtgggagctgcagaaagaaaacagcaaacgctggaacccagaaattcagtacacctccaactacaacaagtcggtgaatgtggagtttaccgtggacgcaaacggtgtttattctgaaccccgccctattggcactcgttaccttacccggaacttgtaatttcctgttaatgaataagccgatttatgcgtttcagttgaactttggtctctgcgaagggcgaattcgtttaaacct

SEQ ID NO: 135 - protein, 735 aa, Artificial Sequence
  Synthetic polypeptide
MAADGYLPDWLEDTLSEGIRQWWKLKPGPPPPKPNQQHRDDSRGLVLPGYKYLGPFNGLDKGEPVNEADAAALEHDKAYDHQLKQGDNPYLKYNHADAEFQERLQEDTSFGGNLGRAVFQAKKRVLEPLGLVEEAVKTAPGKKRPIEQSPAEPDSSSGIGKSGQQPAKKRLNFGQTGDTESVPGPQPIGEPPAAPSGVGSNTMASGGGAPMADNNEGADGVGNSSGNWHCDSTWMGDRVITTSTRTWALPTYNNHLYKQISSESGATNDNHYFGYSTPWGYFDFNRFHCHFSPRDWQRLINNNWGFRPKKLNFKLFNIQVKEVTQNDGTTTIANNLTSAVQVFTDSEYQLPYVLGSAHQGCLPPFPADVFMIPQYGYLTLNNGSQAVGRSSFYCLEYFPSQMLRTGNNFTFSYTFEDVPFHSSYAHSQSLDRLMNPLIDQYLYYLSKTQGTSGTTQQSRLQFSQAGPSSMAQQAKNWLPGPSYRQQRMSKTANDNNNSEFAWTAATKYYLNGRNSLVNPGPPVASHKDDEEKYFPMHGNLIFGKQGTGTTNVDIESVLITDEEEIRTTNPVATEQYGQVATNHQSQNTTASYGSVDSQGILPGMVWQDRDVYLQGPIWAKTPHTDGHFHPSPLMGGFGLKHPPPQILIKNTPVPANPATTFTPGKFASFITQYSTGQVSVEIEWELQKENSKRWNPEIQYTSNYNKSVNVEFTVDANGVYSEPRPIGTRYLTRNL

SEQ ID NO: 136 - DNA, 3123 bp, Artificial Sequence
  Synthetic polynucleotide
gaattcgccctttctacggctgcgtcaactggaccaatgaaaactttcccttcaacgattgcgtcgacaagatggtgatctggtgggaggagggaaagatgaccgccaaggtcgtggaatctgccaaagccattctgggtggaagcaaggttcgtgtggaccagaaatgcaagtcttcggcccagatcgacccgactccggtgattgtcacctctaacaccaacatgtgcgccgtgattgacggaaactcgaccaccttcgagcaccagcagccgttgcaagaccggatgttcaaatttgaacttacccgccgtttggatcatgactttgggaaggtcaccaagcaggaagtcaaagactttttccggtgggctcaagatcacgtgactgaggtggagcatgagttctacgtcaaaaagggtggagccaagaaaaggcccgcccccgatgatgtatatataaatgagcccaagcgggcgcgcgagtcagttgcgcagccatcgacgtcagacgcggaagcttcgataaactacgcgggcaggtaccaaaacaaatgttctcgtcacgtgggcatgaatctgatgctgtttccctgtcgacaatgcgaaagaatgaatcagaattcaaatatctgcttcacacacgggcaaaaagactgtttggaatgctttcccgtgtcagaatctcaacccgtttctgtcgtcagaaaaacgtatcagaaactttgttacattcatcatatcatgggaaaagaaccagacgcctgcactgcctgcgacctggtaaatgtggacttggatgactgtatttctgagcaataaatgacttaaatcaggtatggctgctgacggttatcttccagattggctcgaggacactctctctgaaggaatcagacagtggtggaagctcaaacctggcccaccaccgccgaaacctaaccaacaacaccgggacgacagtaggggtcttgtgcttcctgggtacaagtacctcggacccttcaacggactcgacaaaggagagccggtcaacgaggcagacgccgcggccctcgagcacgacaaagcctacgaccaccagctcaagcaaggggacaacccgtacctcaaatacaaccacgcggacgctgaatttcaggagcgtcttcaagaagatacgtctttcgggggcaacctcgggcgagcagtcttccaggccaaaaagagggtactcgagcctcttggtctggttgaggaagctgttaagacggctcctggaaaaaagagacctatagagcagtctcctgcagaaccggactcttcctcgggcatcggcgaatcaggccagcagcccgctaagaaaagactcaattttggtcagactggcgacacagagtcagtcccagaccctcaaccaatcggagaaccccccgcagccccctctggtgtgggatctaatacaatggcttcaggcggtggggcaccaatggcagacgataacgaaggcgccgacggagtgggtaattcctcgggaaattggcattgcgattccacatggatgggcgacagagttatcaccaccagcacaagaacctgggccctccccacctacaataatcacctctacaagcaaatctccagcgaatcgggagccaccaacgacaaccactacttcggctacagcaccccctgggggtattttgactttaacagattccactgtcacttctcaccacgtgactggcagcgactcatcaacaacaactggggatttagacccaagaaactcaatttcaagctcttcaacatccaagtcaaggaggtcacgcagaatgatggaaccacgaccatcgccaataaccttaccagcacggtgcaggtcttcacagactctgagtaccagctgccctacgtcctcggttcggctcaccagggctgccttccgccgttcccagcagacgtcttcatgattcctcagtacggctacttgactctgaacaatggcagccaagcggtaggacgttcttcattctactgtctagagtattttccctctcagatgctgaggacgggaaacaacttcaccttcagctacacttttgaagacgtgcctttccacagcagctacgcgcacagccagagtctggatcggctgatgaatcctctcattgaccagtacctgtattacctgagcaaaactcagggtacaagtggaacaacgcagcaatcgagactgcagttcagccaagctgggcctagctccatggctcagcaggccaaaaactggctaccgggacccagctaccgacagcagcgaatgtctaagacggctaatgacaacaacaacagtgaatttgcttggactgcagccaccaaatattacctgaatggaagaaattctctggtcaatcccgggcccccaatggccagtcacaaggacgatgaggaaaagtatttccccatgcacggaaatctcatctttggaaaacaaggcacaggaactaccaatgtggacattgaatcagtgcttattacagacgaagaagaaatcagaacaactaatcctgtggctacagaacaatacggacaggttgccaccaaccatcagagtcaggacaccacagcttcctatggaagtgtggacagccagggaatcttacctggaatggtgtggcaggaccgcgatgtctatcttcaaggtcccatttgggccaaaactcctcacacggacggacactttcatccttctccgctcatgggaggctttggactgaaacaccctcctccccagatcctgatcaaaaacacacctgtgccagcgaatcccgcgaccactttcactcctggaaagtttgcttcgttcattacccagtattccaccggacaggtcagcgtggaaatagagtgggagctgcagaaagaaaacagcaaacgctggaacccagaaattcagtacacctccaactacaacaagtcggtgaatgtggagtttaccgtggacgcaaacggtgtttattctgaaccccgccctattggcactcgttaccttacccggaacttgtaatttcctgttaatgaataaaccgatttatgcgtttcagttgaactttggtctctgcgaagggcgaattcgcggccgcta

SEQ ID NO: 137 - protein, 735 aa, Artificial Sequence
  Synthetic polypeptide
MAADGYLPDWLEDTLSEGIRQWWKLKPGPPPPKPNQQHRDDSRGLVLPGYKYLGPFNGLDKGEPVNEADAAALEHDKAYDHQLKQGDNPYLKYNHADAEFQERLQEDTSFGGNLGRAVFQAKKRVLEPLGLVEEAVKTAPGKKRPIEQSPAEPDSSSGIGESGQQPAKKRLNFGQTGDTESVPDPQPIGEPPAAPSGVGSNTMASGGGAPMADDNEGADGVGNSSGNWHCDSTWMGDRVITTSTRTWALPTYNNHLYKQISSESGATNDNHYFGYSTPWGYFDFNRFHCHFSPRDWQRLINNNWGFRPKKLNFKLFNIQVKEVTQNDGTTTIANNLTSTVQVFTDSEYQLPYVLGSAHQGCLPPFPADVFMIPQYGYLTLNNGSQAVGRSSFYCLEYFPSQMLRTGNNFTFSYTFEDVPFHSSYAHSQSLDRLMNPLIDQYLYYLSKTQGTSGTTQQSRLQFSQAGPSSMAQQAKNWLPGPSYRQQRMSKTANDNNNSEFAWTAATKYYLNGRNSLVNPGPPMASHKDDEEKYFPMHGNLIFGKQGTGTTNVDIESVLITDEEEIRTTNPVATEQYGQVATNHQSQDTTASYGSVDSQGILPGMVWQDRDVYLQGPIWAKTPHTDGHFHPSPLMGGFGLKHPPPQILIKNTPVPANPATTFTPGKFASFITQYSTGQVSVEIEWELQKENSKRWNPEIQYTSNYNKSVNVEFTVDANGVYSEPRPIGTRYLTRNL

SEQ ID NO: 138 - DNA, 3113 bp, Artificial Sequence
  Synthetic polynucleotide
gaattcgccctttctacggctgcgtcaactggaccaatgaaaactttcccttcaacgattgcgtcgacaagatggtgatctggtgggaggagggaaagatgaccgccaaggtcgtggaatctgccaaagccattctgggtggaagcaaggttcgtgtggaccagaaatgcaagtcttcggcccagatcgacccgactccggtgattgtcacctctaacaccaacatgtgcgccgtgattgacggaaactcgaccaccttcgagcaccagcagccgttgcaagaccggatgttcaaatttgaacttacccgccgtttggatcatgactttgggaaggtcaccaagcaggaagtcaaagactttttccggtgggctcaagatcacgtgactgaggtggagcatgagttctacgtcaaaaagggtggagccaagaaaaggcccgcccccgatgatgtatatataaatgagcccaagcgggcgcgcgagtcagttgcgcagccatcgacgtcagacgcggaagcttcgataaactacgcggacaggtaccaaaacaaatgttctcgtcacgtgggcatgaatctgatgctgtttccctgtcgacaatgcgaaagaatgaatcagaattcaaatatctgcttcacacacgggcaaaaagactgtttggaatgctttcccgtgtcagaatctcaacccgttcctgtcgtcagaaaaacgtatcagaaactttgttacattcatcatatcatgggaaaagtaccagacgcctgcactgcctgcgacctggtaaatgtggacttggatgactgtatttctgagcaataaatgacttaaatcaggtatggctgctgacggttatcttccagattggctcgaggacactctctctgaaggaatcagacagtggtggaagctcaaacctggcccaccaccgccgaaacctaaccaacaacaccgggacgacagtaggggtcttgtgcttcctgggtacaagtacctcggacccttcaacggactcgacaaaggagagccggtcaacgaggcagacgccgcggccctcgagcacgacaaagcctacgaccaccagctcaagcaaggggacaacccgtacctcaaatacaaccacgcggacgctgaatttcaggagcgtcttcaagaagatacgtctttcgggggcaacctcgggcgagcagtcttccaggccaaaaagagggtactcgagcctcttggtctggttgaggaagctgttaagacggctcctggaaaaaagagacctatagagcagtctcctgcagaaccggactcttcctcgggcatcggcaaatcaggccagcagcccgctaagaaaagactcaattttggtcagactggcgacacagagtcagtcccagaccctcaaccaatcggagaaccccccgcagccccctctggtgtgggatctaatacaatggcttcaggcggtggggcaccaatggcagacaataacgaaggcgccgacggagtgggtaattcctcgggaaattggcattgcgattccacatggatgggcgacagagttatcaccaccagcacaagaacctgggccctccccacctacaataatcacctctacaagcaaatctccagcgaatcgggagccaccaacgacaaccactacttcggctacagcaccccctgggggtattttgactttaacagattccactgtcacttctcaccacgtgactggcagcgactcatcaataacaactggggatttagacccaagaaactcaatttcaagctcttcaacatccaagtcaaggaggtcacgcagaatgatggaaccacgaccatcgccaataaccttaccagcacggtgcaggtcttcacagactctgagtaccagctgccctacgtcctcggttcggctcaccagggctgccttccgccgttcccagcagacgtcttcatgattcctcagtacggctacttgactctgaacaatggcagccaagcggtaggacgttcttcattctactgtctagagtattttccctctcagatgctgaggacgggaaacaacttcaccttcagctacacttttgaagacgtgcctttccacagcagctacgcgcacagccagagtctggatcggctgatgaatcctctcattgaccagtacctgtattacctgagcaaaactcagggtacaagtggaacaacgcagcaatcgagactgcagttcaaccaagctgggcctagctccatggctcagcaggccaaaaactggctaccgggacccagctaccgacagcagcgaatgtctaagacggctaatgacaacaacaacagtgaatttgcttggactgcagccaccaaatattacccgaatggaagaaattctctggtcaatcccgggcccccaatggccagtcacaaggacgatgaggaaaagtatttccccatgcacggaaatctcatctttggaaaacaaggcacaggaactaccaatgtggacattgaatcagtgcttattacagacgaagaagaaatcagaacgactaatcctgtggctacagaacaatacggacaggttgccaccaaccgtcagagtcagaacaccacagcttcctatggaagtgtggacagccagggaatcttacctggaatggtgtggcaggaccgcgatgtctatcttcaaggtcccatttgggccaaaactcctcacacggacggacactttcatccttctccgctcatgggaggctttggactgaaacaccctcctccccagatcctgatcaaaaacacacctgtgccagcgaatcccgcgaccactttcactcctggaaagtttgcttcgttcattacccagtattccaccggacaggtcagcgtggaaatagagtgggagctgcagaaagaaaacagcaaacgctggaacccggaaattcagtacacctccaactacaacaagtcggtgaatgtggagtttaccgtggacgcaaacggtgtttattctgaaccccgccctattggcactcgttaccttacccggaacttgtaatttcctgttaatgaataaaccgatttatgcgtttcagttgaactttggtctctgcgaagggcgaattc

SEQ ID NO: 139 - protein, 735 aa, Artificial Sequence
  Synthetic polypeptide
MAADGYLPDWLEDTLSEGIRQWWKLKPGPPPPKPNQQHRDDSRGLVLPGYKYLGPFNGLDKGEPVNEADAAALEHDKAYDHQLKQGDNPYLKYNHADAEFQERLQEDTSFGGNLGRAVFQAKKRVLEPLGLVEEAVKTAPGKKRPIEQSPAEPDSSSGIGKSGQQPAKKRLNFGQTGDTESVPDPQPIGEPPAAPSGVGSNTMASGGGAPMADNNEGADGVGNSSGNWHCDSTWMGDRVITTSTRTWALPTYNNHLYKQISSESGATNDNHYFGYSTPWGYFDFNRFHCHFSPRDWQRLINNNWGFRPKKLNFKLFNIQVKEVTQNDGTTTIANNLTSTVQVFTDSEYQLPYVLGSAHQGCLPPFPADVFMIPQYGYLTLNNGSQAVGRSSFYCLEYFPSQMLRTGNNFTFSYTFEDVPFHSSYAHSQSLDRLMNPLIDQYLYYLSKTQGTSGTTQQSRLQFNQAGPSSMAQQAKNWLPGPSYRQQRMSKTANDNNNSEFAWTAATKYYPNGRNSLVNPGPPMASHKDDEEKYFPMHGNLIFGKQGTGTTNVDIESVLITDEEEIRTTNPVATEQYGQVATNRQSQNTTASYGSVDSQGILPGMVWQDRDVYLQGPIWAKTPHTDGHFHPSPLMGGFGLKHPPPQILIKNTPVPANPATTFTPGKFASFITQYSTGQVSVEIEWELQKENSKRWNPEIQYTSNYNKSVNVEFTVDANGVYSEPRPIGTRYLTRNL

SEQ ID NO: 140 - DNA, 3122 bp, Artificial Sequence
  Synthetic polynucleotide
agcggccgcgaattcgccctttctacggctgcgtcaactggaccaatgaaaactttcccttcaacgattgcgtcgacaagatggtgatctggtgggaggagggaaagatgaccgccaaggtcgtggaatctgccaaagccattctgggtggaagcaaggttcgtgtggaccagaaatgcaggtcttcggcccagatcgacccgactccggtgattgtcacctctaacaccaacatgtgcgccgtgattgacggaaactcgaccaccttcgagcaccagcagccgttgcaagaccggatgttcaaatttgaacttacccgccgtttggatcatgactttgggaaggtcaccaagcaggaagtcaaagactttttccggtgggctcaagatcacgtgactgaggtggagcatgagttctacgtcaaaaagggtggagccaagaaaaggcccgcccccgatgatgtatatataaatgagcccaagcgggcgcgcgagtcagttgcgcagccatcgacgtcagacgcggaagcttcgataaactacgcggacaggtaccaaaacaaatgttctcgtcacgtgggcatgaatctgatgctgtttccctgtcgacaatgcgaaagaatgaatcagaattcaaatatctgcttcacacacgggcaaaaagactgtttggaatgctttcccgtgtcagaatctcaacccgtttctgtcgtcagaaaaacgtatcagaaactttgttacattcatcatatcatgggaaaagtaccagacgcctgcactgcctgcgacctggtaaatgtggacttggatgactgtatttctgagcaataaatgacttaaatcaggtatggctgctgacggttatcttccagattggctcgaggacactctctctgaaggaatcagacagtggtggaagctcaaacctggcccaccaccgccgaaacctaaccaacaacaccgggacgacagtaggggtcttgtgcttcctgggtacaagtacctcggacccttcaacggactcgacaaaggagagccggtcaacgaggcagacgccgcggccctcgagcacgacaaagcctacgaccaccagctcaagcaaggggacaacccgtacctcaaatacaaccacgcggacgctgaatttcaggagcgtcttcaagaagatacgtctttcgggggcaacctcgggcgagcagtcttccaggccaaaaagagggtactcgagcctcttggtctggttgaggaagctgttaagacggctcctggaaaaaagagacctatagagcagtctcctgcagaaccggactcttcctcgggcatcggcaaatcaggccagcagcccgctaagaaaagactcaattttggtcagactggcgacacagagtcagtcccagaccctcaaccaatcggagaaccccccgcagccccctctggtgtgggatctaatacaatggcttcaggcggtggggcaccaatggcagacaataacgaaggcgccgacggagtgggtaattcctcgggaaattggcattgcgattccacatggatgggcgacagagttatcaccaccagcacaagaacctgggccctccccacctacaataatcgcctctacaagcaaatctccagcgaatcgggagccaccaacgacaaccactacttcggctacagcaccccctgggggtattttgactttaacagattccactgtcacttctcaccacgtgactggcagcgactcatcaacaacaactggggatttagacccaagaaactcaatttcaagctcttcaacatccaagtcaaggaggtcacgcagaatgatggaaccacgaccatcgccaataaccttaccagcacggtgcaggtcttcacagactctgagtaccagctgccctacgtcctcggttcggctcaccagggctgccttccgccgttcccagcagacgtcttcatgattcctcagtacggctacttgactctgaacaatggcagccaagcggtaggacgttcttcattctactgtctagagtattttccctctcagatgctgaggacgggaaacaacttcaccttcagctacacttttgaagacgtgcctttccacagcagctacgcgcacagccagagtctggatcggctgatgaatcctctcattgaccagtacctgtattacctgagcaaaactcagggtacaagtggaacaacgcagcaatcgagactgcagttcagccaagctgggcctagctccatggctcagcaggccaaaaactggctaccgggacccagctaccgacagcagcgaatgtctaagacggctaatgacaacaacaacagtgaatttgcttggactgcagccaccaaatattacctgaatggaagaaattctctggtcaatcccgggcccccaatggccagtcacaaggacgatgaggaaaagtatttccccatgcacggaaatctcatctttggaaaacaaggcacaggaactaccaatgtggacattgaatcagtgcttattacagacgaagaagaaatcagaacaactaatcctgtggctacagaacaatacggacaggttgccaccaaccatcagagtcagaacaccacagcttcctatggaagtgtggacagccagggaatcttacctggaatggtgtggcaggaccgcgatgtctatcttcaaggtcccatttgggccaaaactcctcacacggacggacactttcatccttctccgctcatgggaggctttggactgaaacaccctcctccccagatcctgatcaaaaacacacctgtgccagcgaatcccgcgaccactttcactcctggaaagtttgcttcgttcattacccagtattccaccggacaggtcagcgtggaaatagagtgggagctgcagaaagaaaacagcaaacgctggaacccagaaattcagtacacctccaactacaacaagtcggtgaatgtggagtttaccgtggacgcaaacggtgtttattctgaaccccgccctattggcactcgttaccttacccggaacttgtaatttcctgttaatgaataaaccgatttatgcgtttcagttgaactttggtctctgcgaagggcgaattc

SEQ ID NO: 141 - protein, 735 aa, Artificial Sequence
  Synthetic polypeptide
MAADGYLPDWLEDTLSEGIRQWWKLKPGPPPPKPNQQHRDDSRGLVLPGYKYLGPFNGLDKGEPVNEADAAALEHDKAYDHQLKQGDNPYLKYNHADAEFQERLQEDTSFGGNLGRAVFQAKKRVLEPLGLVEEAVKTAPGKKRPIEQSPAEPDSSSGIGKSGQQPAKKRLNFGQTGDTESVPDPQPIGEPPAAPSGVGSNTMASGGGAPMADNNEGADGVGNSSGNWHCDSTWMGDRVITTSTRTWALPTYNNRLYKQISSESGATNDNHYFGYSTPWGYFDFNRFHCHFSPRDWQRLINNNWGFRPKKLNFKLFNIQVKEVTQNDGTTTIANNLTSTVQVFTDSEYQLPYVLGSAHQGCLPPFPADVFMIPQYGYLTLNNGSQAVGRSSFYCLEYFPSQMLRTGNNFTFSYTFEDVPFHSSYAHSQSLDRLMNPLIDQYLYYLSKTQGTSGTTQQSRLQFSQAGPSSMAQQAKNWLPGPSYRQQRMSKTANDNNNSEFAWTAATKYYLNGRNSLVNPGPPMASHKDDEEKYFPMHGNLIFGKQGTGTTNVDIESVLITDEEEIRTTNPVATEQYGQVATNHQSQNTTASYGSVDSQGILPGMVWQDRDVYLQGPIWAKTPHTDGHFHPSPLMGGFGLKHPPPQILIKNTPVPANPATTFTPGKFASFITQYSTGQVSVEIEWELQKENSKRWNPEIQYTSNYNKSVNVEFTVDANGVYSEPRPIGTRYLTRNL

SEQ ID NO: 142 - DNA, 3121 bp, Artificial Sequence
  Synthetic polynucleotide
gaattcgcccttcgcagagaccaaagttcaactgaaacgaatcaaccggtttattgattaacaagcaattacagattacgggtgaggtaacgggtgccgatggggcgaggctcagaataagtgccatctgtgttaacagcaaagtccacatttgtagatttgtagtagttggaagtgtattgaatctctgggttccagcgtttgctgttttctttctgcagctcccattcaatttccacgctgacctgtccggtgctgtactgcgtgatgaacgacgccagcttagcttgactgaaggtagttggaggatccgcgggaacaggtgtattcttaatcaggatctgaggaggcgggtgtttcagtccaaagccccccatcagcggcgagggatgaaagtttccgtccgtgtgaggaatcttggcccagataggaccctgcaggtacacgtcccggttctgccagaccatgccaggtaaggctccttgactgttgacggcccctacaataggagcggcgttttgctgttgcaggttatcggccaccacgccgtactgttctgtggccactgggttggtggttttaatttcttcctcactggttagcataacgctgctatagtccacgttgccttttccagctccctgtttcccaaacattaagactccgctggacggaaaaaatcgctcttcgtcgtccttgtgggttgccatagcgacaccgggatttaccagagagtctctgccattcagatgatacttggtggcaccggtccaggcaaagttgctgttgttattttgcgacagtgtcgtggagacgcgttgctgccggtagcagggcccgggtagccagtttttggcctgagccgacatgttattaggcccggcctgagaaaatagcaactgctgagttcctgcggtacctcccgtggactgagtccgagacaggtagtacaggtactggtcgatgagggggttcatcagccggtccaggctttggctgtgcgcgtagctgctgtgaaaaggcacgtcctcaaactggtagctgaactcaaagttgttgcccgttctcagcatttgagaaggaaagtactccaggcagtagaaggaggaacggcccacggcctgactgccattgttcagagtcaggtacccgtactgaggaatcatgaagacgtccgccgggaacggaggcaggcagccctggcgcgcagagccgaggacgtacgggagctggtattccgagtccgtaaagacctgaatcgtgctggtaaggttattggcgatggtcttggtgccttcattctgcgtgacctccttgacctggatgttgaagagcttgaagttgagtctcttgggccggaatccccagttgttgttgatgagtcgctgccagtcacgtggtgagaagtggcagtggaatctgttaaagtcaaaatacccccagggggtgctgtagccgaagtaggtgttgtcgttggtgcttcctcccgaagtcccgttggagatttgcttgtagaggtggttgttgtaggtggggagggcccaggttcgggtgctggtggtgatgactctgtcgcccagccatgtggaatcgcaatgccaatttcctgaggaactacccactccgtcggcgccttcgttattgtctgccattggagcgccaccgcctgcagccattgtaccagatcccagaccagaggggcctgcggggggttctccgattggttgagggtcgggcactgactctgagtcgccagtctgcccaaagttgagtctctttttcgcgggctgctggcctttcttgccgatgcccgtagtggagtctggagaacgctggggtgatggctctaccggtctcttctttccaggagccgtcttagcgccttcctcaaccagaccgagaggttcgagaacccgcttcttggcctggaagactgctcgtccgaggttgcccccaaaagacgtatcttcttgcagacgctcctgaaactcggcgtcggcgtggttataccgcaggtacggattgtcacccgctttgagctgctggtcgtaggccttgtcgtgctcgagggccgctgcgtccgccgcgttgacgggctcccccttgtcgagtccgttgaagggtccgaggtacttgtagccaggaagcaccagaccccggccgtcgtcctgcttttgctggttggctttgggcttcggggctccaggtttcagcgcccaccactcgcgaatgccctcagagaggttgtcctcgagccaatctggaagataaccatcggcagccatacctgatctaaatcatttattgttcaaagatgcagtcatccaaatccacattgaccagatcgcaggcagtgcaagcgtctggcacctttcccatgatatgatgaatgtagcacagtttctgatacgcctttttgacgacagaaacgggttgagattctgacacgggaaagcactctaaacagtctttctgtccgtgagtgaagcagatatttgaattctgattcattctctcgcattgtctgcagggaaacagcatcagattcatgcccacgtgacgagaacatttgttttggtacctgtccgcgtagttgatcgaagcttccgcgtctgacgtcgatggctgcgcaactgactcgcgcacccgtttgggctcacttatatctgcgtcactgggggcgggtcttttcttggctccaccctttttgacgtagaattcatgctccacctcaaccacgtgatcctttgcccaccggaaaaagtctttgacttcctgcttggtgaccttcccaaagtcatgatccagacggcgggtgagttcaaatttgaacatccggtcttgcaacggctgctggtgttcgaaggtcgttgagttcccgtcaatcacggcgcacatgttggtgttggaggtgacgatcacgggagtcgggtctatctgggccgaggacttgcatttctggtccacgcgcaccttgcttcctccgagaatggctttggccgactccacgaccttggcggtcatcttcccctcctcccaccagatcaccatcttgtcgacacagtcgttgaagggaaagttctcattggtccagttgacgcagccgtagaagggcgaattc

SEQ ID NO: 143 - protein, 733 aa, Artificial Sequence
  Synthetic polypeptide
MAADGYLPDWLEDNLSEGIREWWDLKPGAPKLKANQQKQDDGRGLVLPGYKYLGPFHGLDKGEPVNAADAAALEHDKAYDQQLKAGDNPYLRYNHADAEFQERLQEDTSFGGNLGRAVFQAKKRVLEPLGLVEEGAKTAPGKKRPLESPQEPDSSSGIGKKGKQPAKKRLNFEEDTGAGDGPPEGSDTSAMSSDIEMRAAPGGNAVDAGQGSDGVGNASGDWHCDSTWSEGKVTTTSTRTWVLPTYNNHLYLRLGTTSNSNTYNGFSTPWGYFDFNRFHCHFSPRDWQRLINNNWGLRPKAMRVKIFNIQVKEVTTSNGETTVANNLTSTVQIFADSSYELPYVMDAGQEGSLPPFPNDVFMVPQYGYCGIVTGENQNQTDRNAFYCLEYFPSQMLRTGNNFEMAYNFEKVPFHSMYAHSQSLDRLMNPLLDQYLWHLQSTTSGETLNQGNAATTFGKIRSGDFAFYRKNWLPGPCVKQQRFSKTASQNYKIPASGGNALLKYDTHYTLNNRWSNIAPGPPMATAGPSDGDFSNAQLIFPGPSVTGNTTTSANNLLFTSEGEIAATNPRDTDMFGQIADNNQNATTAPITGNVTAMGVLPGMVWQNRDIYYQGPIWAKIPHADGHFHPSPLIGGFGLKHPPPQIFIKNTPVPANPATTFTAARVDSFITQYSTGQVAVQIEWEIEKERSKRRNPEVQFTSNYGNQSSMLWAPDTTGKYTEPRVIGSRYLTNHL

SEQ ID NO: 144 - protein, 735 aa, Artificial Sequence
  Synthetic polypeptide
MAADGYLPDWLEDTLSEGIRQWWKLKPGPPPPKPNQQHRDDSRGLVLPGYKYLGPFNGLDKGEPVNEADAAALEHDKAYDHQLKQGDNPYLKYNHADAEFQERLQEDTSFGGNLGRAVFQAKKRVLEPLGLVEEAVKTAPGKKRPIEQSPAEPDSSSGIGKSGQQPAKKRLNFGQTGDTESVPDPQPIGEPPAAPSGVGSNTMASGGGAPMADNNEGADGVGNSSGNWHCDSTWMGDRVITTSTRTWALPTYNNHLYKQISSESGATNDNHYFGYSTPWGYFDFNRFHCHFSPRDWQRLINNNWGFRPKKLNFKLFNIQVKEVTQNDGTTTIANNLTSTVQVFTDSEYQLPYVLGSAHQGCLPPFPADVFMIPQYGYLTLNNGSQAVGRSSFYCLEYFPSQMLRTGNNFTFSYTFEDVPFHSSYAHSQSLDRLMNPLIDQYLYYLSKTQGTSGTTQQSRLQFSQAGPSSMAQQAKNWLPGPSYRQQRMSKTANDNNNSEFAWTAATKYYLNGRNSLVNPGPPMASHKDDEEKYFPMHGNLIFGKQGTGTTNVDIESVLITDEEEIRTTNPVATEQYGQVATNHQSQNTTASYGSVDSQGILPGMVWQDRDVYLQGPIWAKIPHTDGHFHPSPLMGGFGLKHPPPQILIKNTPVPANPATTFTPGKFASFITQYSTGQVSVEIEWELQKENSKRWNPEIQYTSNYNKSVNVEFTVDANGVYSEPRPIGTRYLTRNL

SEQ ID NO: 145 - DNA, 3127 bp, Artificial Sequence
  Synthetic polynucleotide
gcggccgcgaattcgcccttcgcagagaccaaagttcaactgaaacgaatcaaccggtttattgattaacatgcaattacagattacgggtgaggtaacgagtgccaatagggcgaggctcagagtaaacaccctggctgtcaacggcaaagtccacaccagtctgcttttcaaagttggaggtgtactgaatctccgggtcccagcgcttgctgttttccttctgcagctcccactcgatttccacgctgacttgtccggtgctgtactgtgtgatgaacgaagcaaacttggcaggagtaaacacctccggaggattagcgggaacgggagtgttcttgatcaggatctgaggaggcggatgtttaagtccaaagccgcccatcaaaggagacgggtgaaagttgccatccgtgtgaggaatcttggcccagatgggaccctgcaggtacacgtcccggttctgccagaccatgccaggtaaggctccctggttgttgacaacttgtgtctgggctgcagtattagccgcttgtaagttgctgctgactatcccgtattcttccgtggctacaggattagtaggacgaatttcttcttcatttgtcattaacacattttccaatgtagttttgttagttgctccagtttttccaaaaatcaggactccgctggatgggaaaaagcggtcctcgtcgtccttgtgagttgccatggcgacgccgggattaaccaacgagtttctgccgttcaggtgatatttggtggcaccagtccaagcaaagttgctgttgttgttttgatccagcgttttggagaccctttgttgccggaagcagggtccaggtaaccaattcttggcttgttcggccatagttgaaggcccgccctggtaaaactgcagttcccgattgccagctgtgcctcctgggtcactctgtgttctggccaggtagtacaagtactggtcgatgaggggattcatcagccggtccaggctctggctgtgtgcgtagctgctgtggaaaggcacgtcctcgaagctgtagctgaactcaaagttgttgcccgttctcagcatctgagaggggaagtactccaggcagtagaaggaggaacgtcccacagactgactgccattgttgagagtcaggtagccgtactgaggaatcatgaagacgtccgccgggaacggaggcaggcagccctggtgcgcagagccgaggacgtacggcagctggtattccgagtccgagaatacctgaatcgtgctggtaaggttattagcgatggtcgtaacgccgtcattcgtcgtgacctccttgacctggatgttgaagagcttgaaccgcagcttcttgggccggaatccccagttgttgttgatgagtcgctgccagtcacgtggtgagaagtggcagtggaatctgttaaagtcaaaatacccccagggggtgctgtagccgaagtaggtgttgtcgttggtactacctgcagtttcactggagatttgctcgtagaggtggttgttgtaggtgggcagggcccaggttcgggtgctggtggtaatgactctgtcgcccagccatgtggaatcgcaatgccaatttcctgaggcattacccactccgtcggcaccttcgttattgtctgccattggtgcgccaccgcctgcagccactgtaccagatcccacactagagggcgctgctggaggttctccgagaggttgagggtcggggactgactctgagtcgccagtctgaccgaaattgagtctctttctggcgggctgctggcccttcttgccgatgcccgtggaggagtcgggggaacgctgaggtgacggctctaccggtctcttctttgcaggagccgtcttagcgccttcctcaaccagaccgagaggttcgagaacccgcttcttggcctggaagactgctcgcccgaggttgcccccaaatgacgtatcttcttgcagacgctcctgaaactcggcgtcggcgtggttataccgcaggtacgggttgtcacccgcattgagctgctggtcgtaggccttgtcgtgctcgagggccgctgcgtccgccgcgttgacgggctcccccttgtcgagtccgttgaagggtccgaggtacttgtagccaggaagcaccagaccccggccgttgtcctgcttttgctggttggctttgggtttcggggctccaggtttcaggtcccaccactcgcgaatgccctcagagaggttgtcctcgagccaatctggaagataaccatcggcagccatacctgatttaaatcatttattgttcaaagatgcagtcatccaaatccacattgaccagatcgcaggcagtgcaagcgtctggcacctttcccatgatatgatgaatgtagcacagtttctgatacgcctttttgacgacagaaacgggtttagattctgacacgggaaagcactctaaacagtctttctgtccgtgagtgaagcagatatttgaattctgattcattctctcgcattgtctgcagggaaacagcatcagattcatgcccacgtgacgagaacatttgttttggtacctgtctgcgtagttgatcgaagcttccgcgtctgacgtcgatggctgcgcaactgactcgcgcacccgtttgggctcacttatatctgcgtcactgggggcgggtcttttcttggctccaccctttttgacgtagaattcatgctccacctcaaccacgtaatcctttgcccaccggaaaaagtctttgacttcctgcttggtgaccttcccaaagtcatgatccagacggcgggtgagttcaaatttgaacatccggtcttgcaacggctgctggtgttcgaaggtcgttgagttcccgtcgatcacggcgcacatgttggtgttggagatgacgatcgcgggagtcgggtctatctgggccgaggacttgcatttctggtccacgcgcaccttgcttcctccgagaatggctttggccgactccacgaccttggcggtcatcttcccctcctcccaccagatcaccatcttgtcgacacagtcgttgaagggaaagttctcattggtccagttgacgcagccgtagaaagggcgaattc

SEQ ID NO: 146 - protein, 728 aa, Artificial Sequence
  Synthetic polypeptide
MAADGYLPDWLEDNLSEGIREWWDLKPGAPKPKANQQKQDDGRGLVLPGYKYLRPFNGLDKGEPVNEADAAALEHDKAYDKQLEQGDNPYLKYNHADAEFQERLQEDTSFGGNLGRAVFQAKKRVLEPLGLVEEVAKTAPGKKRPIESPDSSTGIGKKGQQPAKKKLNFGQTGDSESVPDPQPLGEPPAAPSGLGSGTMAAGGGAPMADNNEGADGVGNASGNWHCDSTWLGDRVITTSTRTWALPTYNNHLYKQISSQSGATNDNHFFSYSTPWGYFDFNRFHCHFSPRDWQRLINNNWGFRPRKLRFKLFNIQVKEVTTNDGVTTIANNLTSTIQVFSDSEYQLPYVLGSAHQGCLPPFPADVFMIPQYGYLTLNNGSQSVGRSSFYCLEYFPSQMLRTGNNFEFSYTFEEVPFHSSYVHSQSLDRLMNPLIDQYLYYLARTQSTTGSTRELQFHQAGPNTMAEQSKNWLPGPCYRQQRLSKNIDSNNNSNFAWTGATKYHLNGRNSLTNPGVAMATNKDDEDQFFPINGVLVFGKTGAANKTTLENVLMTSEEEIKTTNPVATEEYGVVSSNLQSSTAGPQTQTVNSQGALPGMVWQNRDVCLQGPIWAKIPHTDGNFHPSPLMGGFGLKHPPPQILIKNTPVPANPPEVFTPAKFASFITQYSTGQVSVEIEWELQKENSKRWNPEIQYTSNYAKSNNVEFAVNNEGVYTEPRPIGTRYLTRNL

SEQ ID NO: 147 - DNA, 3106 bp, Artificial Sequence
  Synthetic polynucleotide
gcggccgcgaattcgcccttcgcagagaccaaagttcaactgaaacgaatcaaccggtttattgattaacaagtaattacaggttacgggtgaggtaacgggtgccaatggggcgaggctcagtataaaccccttcgttgttgacagcaaattccacattattagacttggcataatttgaggtgtactgaatctctggattccagcgtttgctgttttctttctgcagttcccactcgatctccacgctgacctggccggtgctgtactgcgtgataaatgaggcaaacttggcaggagtaaacacctctggaggattagcaggtaccggggtgtttttgatgagaatttgaggaggcgggtgtttgagtccaaatccgcccatcaggggagacgggtgaaagttgccgtccgtgtgaggaattttggcccagatgggaccctgcaggcacacgtcccggttctgccagaccatgccgggcagagccccctggctgttgacagtctgtgtctggggtccggccgtagacgattgcaggttgctggagaccacaccgtattcttctgtagccacgggattggtggttttgatctcctcctcgctggtcattagcacgttttccagcgttgtcttgttggcagcccccgttttgccaaaaaccagcactccgttgatgggaaagaactggtcctcgtcgtccttgttggtggccatggctacgcccgggttggttaatgaatttctaccattcagatggtatttagtggccccggtccaggcaaagttactgttgttgttgctgtctatgttttttgacagtctctgctgccgataacagggtccgggcagccagttctttgattgctcggccatggtgttgggcccagcctgatggaactgcagctcccttgtggaccccgtagtgctctgggtccgggccaggtagtacaggtactggtcgatgaggggattcatcagccggtctaggctctggctgtgcacatagctgctgtggaaaggcacttcctcaaaggtgtagctgaattcaaagttattgcccgttctcagcatctgagaaggaaagtactccaggcagtagaaggaggaacgtcccacagactgactgccgttgtttagagtcagatatccgtactgaggaatcatgaacacgtccgcagggaacggagggaggcagccctggtgcgcagagccgaggacgtacggcagttggtactccgagtccgagaagacctgaatcgtgctggtaaggttattagcgatggtcgtaacgccgtcgttcgtcgtgacctccttgacctggatgttgaacaacttgaaccgcagctttctgggccggaatccccagttgttgttgatgagtcgctgccagtcacgtggtgagaagtggcagtggaatctgttgaagtcaaaatagccccagggggtgctgtagctgaagaagtggttgtcgttggtagccccgctctgacttgatatctgcttgtagaggtggttgttgtaggtgggcagggcccaggtgcgggtgctggtggtgatgactctgtcgcccagccatgtggaatcgcaatgccaatttccggaggcattacccactccgtcggcgccttcgttattgtctgccattggtgcgccaccgcctgcagccattgtaccagatcccagacctgagggcgcggcgggaggttctccgagaggttgggggtcgggcactgactctgagtcgccagtctgcccaaagttgagcttctttttagcgggctgctggcctttcttgccgatgcccgtggaggagtcgggggattctatgggtctcttctttccaggagccgtcttagcgacttcctcaaccagaccgagaggttcgagaacccgcttcttggcctggaagactgctcgcccgaggttgcccccaaaagacgtatcttcttgaagacgctcctgaaactcggcgtcggcgtggttgtacttgaggtacgggttgtccccctgctcgagctgcttgtcgtaggccttgtcgtgctcgagggccgcggcgtctgcctcgttgaccggctctcccttgtcgagtccgttgaagggtctgaggtacttgtagccaggaagcaccagaccccggccgtcgtcctgcttttgctggttggctttgggtttcggggctccaggtttcaagtcccaccactcgcgaatgccctcagagaggttgtcctcgagccaatctggaagataaccatcggcagccatacctggtttaagtcatttattgctcagaaacacagtcatccaggtccacgttgaccagatcgcaggccgagcaagcaatctcgggagcccgccccagcagatgatgaatggcacagagtttccgatacgtcctctttctgacgaccggttgagattctgacacgccggggaaacattctgaacagtctctggtcccgtgcgtgaagcaaatgttgaaattctgattcactctctcgcatgtcttgcagggaaacagcatctgaagcatgcccgcgtgacgagaacatttgttttggtacctgtcggcaaagtccaccggagctccttccgcgtctgacgtcgatggattcgcgactgaggggcaggcccgcttgggctcgcttttatccgcgtcatcgggggcgggtctcttgttggccccaccctttctgacgtagaacccatgcgccacctcggtcacgtgatcctgcgcccagcggaagaaccttttgacttcctgctttgtcaccttgccaaagttatgctccagacggcgggtgggttcaaatttgaacatccggtcctgcaacggctgctggtgctcgaaggtggcgctgttcccgtcaatcacggcgcacatgttggtgttggaggtgacggtcacgggggtggggtcgatctgggcggacgacttgcacttttggtccacgcgcaccttgctgccgccgagaatggccttggcggactccacgaccttggccgtcatcttgccctcctcccaccagatcaccatcttgtcggcgcaatcgttgaagggaaagttctcattggtccagttgacgcagccgtagaaagggcgaattc

SEQ ID NO: 148 - protein, 728 aa, Artificial Sequence
  Synthetic polypeptide
MAADGYLPDWLEDNLSEGIREWWDLKPGAPKPKANQQKQDDGRGLVLPGYKYLGPFNGLDKGEPVNEADAAALEHDKAYDKQLEQGDNPYLKYNHADAEFQERLQEDTSFGGNLGRAVFQAKKRVLEPLGLVEEGAKTASGKKRPIESPDSSTGIGKKGQQPAKKKLNFGQTGDSESVPDPQPLGEPPAAPSGLGSGTMAAGGGAPMADNNEGADGVGNASGNWHCDSTWLGDRVITTSTRTWALPTYNNHLYKQISSQSGATNDNHFFGYSTPWGYFDFNRFHCHFSPRDWQRLINNNWGFRPRKLRFKLFNIQVKEVTTNDGVTTIANNLTSTIQVFSDSEYQLPYVLGSAHQGCLPPFPADVFMIPQYGYLTLNNGSQSVGRSSFCCLEYFPSQMLRTGNNFEFSYTFEEVPFHSSYAHSQSLDRLMNPLIDQYLYYLARTQSTTGSTRELQFHQAGPNTVAEQSKNWLPGPCYRQQRLSKNIDSNNNSNFAWTGATKYHLNGRNSLTNPGVAMATNKDDEDQFLPINGVLVFGKTGAANKTTLENVLMTSEEEIKTTNPVATEEYGVVSSNLQSSTAGPRTQTVNSQGALPGMVWQNRDVYLQGPIWAEIPHTDGNFHPSPLMGGFGLKHPPPQILIKNTPVPANPPEVFTPAKFASFITQYSTGQVSVEIEWELQKENSKRWNPEIQYTSNYAKSNNVEFAVNNEGVYTEPRPIGTRYLTRNL

SEQ ID NO: 149 - DNA, 3102 bp, Artificial Sequence
  Synthetic polynucleotide
gcggccgcgaattcgcccttcgcagagaccaaagttcaactgaaacgaatcaaccggtttattgattaacaagtaattacaggttacgggtgaggtaacgggtgccaatggggcgaggctcagtataaaccccttcgttgttgacagcaaattccacattattagacttggcataatttgaggtgtactgaatctctggattccagcgtttgctgttttctttctgcagttcccactcgatctccacgctgacctggccggtgctgtactgcgtgataaatgaggcaaacttggcaggagtaaacacctctggaggattagcaggtaccggggtgtttttgatgagaatttgaggaggcgggtgtttgagtccaaatccgcccatcaggggagacgggtgaaagttgccgtccgtgtgaggaatttcggcccagatgggaccctgcaggtacacgtcccggttctgccagaccatgccgggcagagccccctggctgttgacagtctgtgtccggggtccggccgtagacgattgcaggttgctggagaccacaccgtattcttctgtagccacgggattggtggttttgatctcctcctcgctggtcattagcacgttttccagcgttgtcttgttggcagcccccgttttgccaaaaaccagcactccgttgatgggaaggaactggtcctcgtcgtccttgttggtggccatggctacgcccgggttggttaatgaatttctaccattcagatggtatttagtggccccggtccaggcaaagttactgttgttgttgctgtctatgttttttgacagtctctgctgccgataacagggtccgggcagccagttctttgattgctcggccacggtgttgggcccagcctgatggaactgcagctcccttgtggaccccgtagtgctctgggtccgggccaggtagtacaggtactggtcgatgaggggattcatcagccggtccaggctctggctgtgcgcatagctgctgtggaaaggcacttcctcaaaggtgtagctgaattcaaagttattgcccgttctcagcatctgagaaggaaagtactccaggcagcagaaggaggaacgtcccacagactgactgccgttgtttagagtcagatatccgtactgaggaatcatgaacacgtccgcagggaacggagggaggcagccctggtgcgcagagccgaggacgtacggcagttggtactccgagtccgagaagacctgaatcgtgctggtaaggttattagcgatggtcgtaacgccgtcgttcgtcgtgacctccttgacctggatgttgaacaacttgaaccgcagctttctgggccggaatccccagttgttgttgatgagtcgctgccagtcacgtggtgagaagtggcagtggaatctgttgaagtcaaaatagccccagggggtgctgtagccgaagaagtggttgtcgttggtagccccgctctgacttgatatctgcttgtagaggtggttgttgtaggtgggcagggcccaggtgcgggtgctggtggtgatgactctgtcgcccagccatgtggaatcgcaatgccaatttccggaggcattacccactccgtcggcgccttcgttattgtctgccattggtgcgccaccgcctgcagccattgtaccagatcccagacctgagggcgcggcgggaggttctccgagaggttgggggtcgggcactgactctgagtcgccagtctgcccaaagttgagcttctttttagcgggctgctggcctttcttgccgatgcccgtggaggagtcgggggattctatgggtctcttctttccggaagccgtcttagcgccttcctcaaccagaccgagaggttcgagaacccgcttcttggcctggaagactgctcgcccgaggttgcccccaaaagacgtatcttcttgaagacgctcctgaaactcggcgtcggcgtggttgtacttgaggtacgggttgtccccctgctcgagctgcttgtcgtaggccttgtcgtgctcgagggccgcggcgtctgcctcgttgaccggctctcccttgtcgagtccgttgaagggtccgaggtacttgtagccaggaagcaccagaccccggccgtcgtcctgcttttgctggttggctttgggtttcggggctccaggtttcaagtcccaccactcgcgaatgccctcagagaggttgtcctcgagccaatctggaagataaccatcggcagccatacctggtttaagtcatttattgctcagaaacacagtcatccaggtccacgttgaccagatcgcaggccgagcaagcaatctcgggagcccgccccagcagatgatgaatggcacagagtttccgatacgtcctctttctgacgaccggttgagattctgacacgccggggaaacattctgaacagtctctggtcccgtgcgtgaagcaaatgttgaaattctgattcattctctcgcatgtcttgcagggaaacagcatctgaagcatgcccgcgtgacgagaacatttgttttggtacctgtcggcaaagtccaccggagctccttccgcgtctgacgtcgatggatccgcgactgaggggcaagcccgcttgggctcgcttttatccgcgtcatcgggggcgggtctcttgttggctccaccctttctgacgtagaactcatgcgccacctcggtcacgtgatcctgcgcccagcggaagaactctttgacttcctgctttgtcaccttgccaaagtcatgctccagacggcgggtgagttcaaatttgaacatccggtcttgtaacggctgctggtgctcgaaggtggtgctgttcccgtcaatcacggcgcacatgttggtgttggaagtgacgatcacgggggtgggatcgatctgggcggacgacttgcacttttggtccacgcgcaccttgctgccgccgagaatggccttggcggactccacgaccttggccgtcatcttgccctcctcccaccagatcaccatcttgtcgacgcaatcgttgaagggaaagttctcattggtccagttgacgcagccgaagggcgaattc

SEQ ID NO: 150 - protein, 728 aa, Artificial Sequence
  Synthetic polypeptide
MAADGYLPDWLEDNLSEGIREWWDLKPGAPKPKANQQKQDDGRGLVLPGYRYLGPFNGLDKGEPVNEADAAALEHDKAYDKQLEQGDNPYLKYNHADAEFQERLQEDTSFGGNLGRAVFQAKKRVLEPLGLVEEGAKTAPGKKRPIESPDSSTGIGKNGQPPAKKKLNFGQTGDSESVPDPQPLGEPPAAPSGLGSGTMAAGGGAPMADNNEGADGVGNASGNWHCDSTWLGDRVITTSTRTWALPTYNNHLYKQISSQSGATNDNHFFGYSTPWGYFDFNRFHCHFSPRDWQRLINNNWGFRPRKLRFKLFNIQVKEVTTNDGVTTIANNLTSTIQVFSDSEYQLPYVLGSAHQGCLPPFPADVFMIPQYGYLTLNNGSQSVGRSSFYCLEYFPSQMLRTGNNFEFSYTFEEVPFHSSYAHSQSLDRLMNPLIDQYLYYLARTQSTTGSTRELQFHQAGPNTMAEQSKNWLPGPCYRQQRLSKNIDSNNNSNFAWTGATKYHLNGRNSLTNPGVAMATNKDDEDQFFPINGVLVFGKTGAANKTTLENVLMTSEEEIKTTNPVATEEYGVVSSNLQSSTAGPQTQTVNSQGALPGMVWQNRDVYLQGPIWAKIPHTDGNFHPSPLMGGFGLKHPPPQILIKNTPVPANPPEVFTPAKFASFITQYSTGQVSVEIEWELQKENSKRWNPEIQYTSNYAKSNNVEFAVNNEGVYTEPRPIGTRYLTRNL

SEQ ID NO: 151 - protein, 728 aa, Artificial Sequence
  Synthetic polypeptide
MAADGYLPDWLEGNLSEGIREWWDLKPGAPKPKANQQKQDDGRGLVLPGYRYLGPFNGLDKGEPVNEADAAALEHDKAYDKQLEQGDNPYLKYNHADAEFQERLQEDTSFGGNLGRAVFQAKKRVLEPLGLVEEGAKTAPGKKRPIESPDSSTGIGKNGQPPAKKKLNFGQTGDSESVPDPQPLGEPPAAPSGLGSGTMAAGGGAPMADNNEGADGVGNASGNWHCDSTWLGDRVITTSTRTWALPTYNNHLYKQISSQSGATNDNHFFGYSTPWGYFDFNRFHCHFSPRDWQRLINNNWGFRPRKLRFKLFNIQVKEVTTNDGVTTIANNLTSTIQVFSDSEYQLPYVLGSAHQGCLPPFPADVFMIPQYGYLTLNNGSQSVGRSSFYCLEYFPSQMLRTGDNFEFSYTFEEVPFHSSYAHSQSLDRLMNPLIDQYLYYLARTQSTTGSTRELQFHQAGPNTMAEQSKNWLPGPCYRQQRLSKNIDSNNNSNFAWTGATKYHLNGRNSLTNPGVAMATNKDDEDQFFPINGVLVFGKTGAANKTTLENVLMTSEEEIKTTNPVATEEYGVVSSNLQSSTAGPQTQTVNSQGALPGMVWQNRDVYLQGPIWAKIPHTDGNFHPSPLMGGFGLKHPPPQILIKNTPVPANPPEVFTPAKFASFITQYSTGQVSVEIEWELQKENSKRWNPEIQYTSNYAKSNNVEFAVNNEGVYTEPRPIGTRYLTRNL

SEQ ID NO: 152 - DNA, 3106 bp, Artificial Sequence
  Synthetic polynucleotide
gcggccgcgaattcgcccttcgcagagaccaaagttcaactgaaacgaatcagccggtttattgattaacaagtaattacaggttacgggtgaggtaacgggtgccaatggggcgaggctcagtataaaccccttcgttgttgacagcaaattccacattattagacttggcataatttgaggtgtactgaatctctggattccagcgtttgctgttttctttctgcagttcccactcgatctccacgctgacctggccggtgctgtactgcgtgataaatgaggcaaacttggcaggagtaaacacctctggaggattagcaggtaccggggtgtttttgatgagaatttgaggaggcgggtgtttgagtccaaatccgcccatcaggggagacgggtgaaagttgccgtccgtgtgaggaattttggcccagatgggaccctgcaggtacacgtcccggttctgccagaccatgccgggcagagccccctggctgttgacagtctgtgtctggggtccggccgtagacgattgcaggttgctggagaccacaccgtattcttctgtagccacgggattggtggttttgatctcctcctcgctggtcattagcacgttttccagcgttgtcttgttggcagcccccgttttgccaaaaaccagcactccgttgatgggaaagaactggtcctcgtcgtccttgttggtggccatggctacgcccgggttggttaatgaatttctaccattcagatggtatttagtggccccggtccaggcaaagttactgttgttgttgctgtctatgttttttgacagtctctgctgccgataacagggtccgggcagccagttctttgattgctcggccatggtgttgggcccagcctgatggaactgcagctcccttgtggaccccgtagtgctctgggtccgggccaggtagtacaggtactggtcgatgaggggattcatcagccggtccaggctctggctgtgcgcatagctgctgtggaaaggcacttcctcaaaggtgtagctgaattcaaagttatcgcccgttctcagcatctgagaaggaaagtactccaggcagtagaaggaggaacgtcccacagactgactgccgttgtttagagtcagatatccgtactgaggaatcatgaacacgtccgcagggaacggagggaggcagccctggtgcgcagagccgaggacgtacggcagttggtactccgagtccgagaagacctgaatcgtgctggtaaggttattagcgatggtcgtaacgccgtcgttcgtcgtgacctccttgacctggatgttgaacaacttgaaccgcagctttctgggccggaatccccagttgttgttgatgagtcgctgccagtcacgtggtgagaagtggcagtggaatctgttgaagtcaaaatagccccagggggtgctgtagccgaagaagtggttgtcgttggtagccccgctctgacttgatatctgcttgtagaggtggttgttgtaggtgggcagggcccaggtgcgggtgctggtggtgatgactctgtcgcccagccatgtggaatcgcaatgccaatttccggaggcattacccactccgtcggcgccttcgttattgtctgccattggtgcgccaccgcctgcagccattgtaccagatcccagacctgagggcgcggcgggaggttctccgagaggttgggggtcgggcactgactctgagtcgccagtctgcccaaagttgagcttctttttagcgggcggctggccgttcttgccgatgcccgtggaggagtcgggggattctatgggtctcttctttccaggagccgtcttagcgccttcctcaaccagaccgagaggttcgagaacccgcttcttggcctggaagactgctcgcccgaggttgcccccaaaagacgtatcttcttgaagacgctcctgaaactcggcgtcggcgtggttgtacttgaggtacgggttgtccccctgctcgagctgcttgtcgtaggccttgtcgtgctcgagggccgcggcgtctgcctcgttgaccggctctcccttgtcgagtccgttgaagggtccgaggtacctgtagccaggaagcaccagaccccggccgtcgtcctgcttttgctggttggctttgggtttcggggctccaggtttcaagtcccaccactcgcgaatgccctcagagaggttgccctcgagccaatctggaagataaccatcggcagccatacctggtttaagtcatttattgctcagaaacacagtcatccaggtccacgttggccagatcgcaggccgagcaagcaatctcgggagcccgccccagcagatgatgaatggcacagagtttccgatacgtcctctttctgacgaccggttgagattctgacacgccggggaaacattctgaacagtctctggtcccgtgcgtgaagcaaatgttgaaattctgattcattctctcgcatgtcttgcaggggaacagcatctgaagcatgcccgcgtgacgagaacatttgttttggtacctgtcggcaaagtccaccggagctccttccgcgtctgacgtcgatggatccgcgactgaggggcaggcccgcttgggctcgcttttatccgcgtcatcgggggcgggtctcttgttggctccaccctttctgacgtagaactcatacgccacctcggtcacgtgatcctgcgcccagcggaagaactctttgacttcctgctttgtcaccttgccaaagtcatgctccagacggcgggtgagttcaaatttgaacatccggtcttgtaacggctgctggtgctcgaaggtggtgctgttcccgtcaatcacggcgcacatgttggtgttggaagtgacgatcacgggggtgggatcgatctgggcggacgacttgcacttttggtccacgcgcaccttgctgccgccgagaatggccttggcggactccacgaccttggccgtcatcctgccctcctcccaccagatcaccatcttgtcgacgcaatcgttgaagggaaagttctcattggtccagttgacgcagccgtagaaagggcgaattc

SEQ ID NO: 153 - protein, 728 aa, Artificial Sequence
  Synthetic polypeptide
MAADGYLPDWLEDNLSEGIREWWDLKPGAPKPKANQQKQDDGRGLVLPGYKYLGPFNGLDKGEPVNEADAAALEHDKAYDKQLEQGDNPYLKYNHADAEFQERLQEDTSFGGNLGRAVFQAKKRVLEPLGLVEEGAKTAPGKKRPIESPDSSTGIGKKGQQPAKKKLNFGQTGDSESVPDPQPLGEPPAAPSGLGSGTMAAGGGAPMADNNEGADGVGNASGNWHCDSTWLGDRVITTSTRTWALPTYNNHLYKQISSQSGATNDNHFFGYSTPWGYFDFNRFHCHFSPRDWQRLINNNWGFRPRKLRFKLFNIQVKEVTTNDGVTTIANNLTSTIQVFSDSEYQLPYVLGSAHQGCLPPFPADVFMIPQYGYLTLNNGSQSMGRSSFYCLEYFPSQMLRTGNNFEFSYTFEEVPFHSSYAHSQSLDRLMNPLIDQYLYYLARTQSTTGSTRELQFHQAGPNTMAEQSKNWLPGPCYRQQRLSKNIDSNNNSNFAWTGATKYHLNGRNSLTNPGVAMATNKDDEGQFFPINGVLVFGKTGAANKTTLENVLMTSEEEIKTTNPVATEEYGVVSSNLQSSTAGPQTQTVNSQGALPGMVWQNRDVYLQGPIWAKIPHTDGNFHPSPLMGGFGLKHPPPQILIKNTPVPANPPGVFTPALFASFITQYSTGQVSVEIEWELQKENSKRWNPEIQYTSNYAKSNNVEFAVNNEGVYTEPRPIGTRYLTRNL

SEQ ID NO: 154 - DNA, 3098 bp, Artificial Sequence
  Synthetic polynucleotide
gaattcgcccttcgcagagaccaaagttcaactgaaacgaatcaaccggtttattgattaacaagtaattacaggttacgggtgaggtaacgggtgccaatggggcgaggctcagtataaaccccttcgttgttgacagcaaattccacattattagacttggcataatttgaggtgtactgaatctctggattccagcgtttgctgttttctttctgcagttcccactcgatctccacgctgacctggccggtgctgtactgcgtgataaatgaggcaaactaggcaggagtaaacacccctggaggattagcaggtaccggggtgtttttgatgagaatttgaggaggcgggtgtttgagtccaaatccgcccatcaggggagacgggtgaaagttgccgtccgtgtgaggaattttggcccagatgggaccctgcaggtacacgtcccggttctgccagaccatgccgggcagagccccctggctgttgacagtctgtgtctggggtccggccgtagacgattgcaggttgctggagaccacaccgtattcttctgtagccacgggattggtggttttgatctcctcctcgctggtcattagcacgttttccagcgttgtcttgttggcagcccccgttttgccaaaaaccagcactccgttgatgggaaagaactggccctcgtcgtccttgttggtggccatggctacgcccgggttggttaatgaatttctaccattcagatggtatttagtggccccggtccaggcaaagttactgttgttgttgctgtctatgttttttgacagtctctgctgccgataacagggtccgggcagccagttctttgattgctcggccatggtgttgggcccagcctgatggaactgcagctcccttgtggaccccgtagtgctctgggtccgggccaggtagtacaggtactggtcgatgaggggattcatcagccggtccaggctctggctgtgcgcatagctgctgtggaaaggcacttcctcaaaggtgtagctgaattcaaagttattgcccgttctcagcatctgagaaggaaagtactccaggcagtagaaggaggaacgtcccatagactgactgccgttgtttagagtcagatatccgtactgaggaatcatgaacacgtccgcagggaacggagggaggcagccctggtgcgcagagccgaggacgtacggcagttggtactccgagtccgagaagacctgaatcgtgctggtaaggttattagcgatggtcgtaacgccgtcgttcgtcgtgacctccttgacctggatgttgaacaacttgaaccgcagctttctgggccggaatccccagttgttgttgatgagtcgctgccagtcacgtggtgagaagtggcagtggaatctgttgaagtcaaaatagccccagggggtgctgtagccgaagaagtggttgtcgttggtagccccgctctgacttgatatctgcttgtagaggtggttgttgtaggtgggcagggcccaggtgcgggtgctggtggtgatgactctgtcgcccagccatgtggaatcgcaatgccaatttccggaggcattacccactccgtcggcgccttcgttattgtctgccattggtgcgccaccgcctgcagccattgtaccagatcccagacctgagggcgcggcgggaggttctccgagaggttgggggtcgggcactgactctgagtcgccagtctgcccaaagttgagcttctttttagcgggctgctggcctttcttgccgatgcccgtggaggagtcgggggattctatgggtctcttctttccaggagccgtcttagcgccttcctcaaccagaccgagaggttcgagaacccgcttcttggcctggaagactgctcgcccgaggttgcccccaaaagacgtatcttcttgaagacgctcctgaaactcagcgtcggcgtggttgtacttgaggtacgggttgtccccctgctcgagctgcttgtcgtaggccttgtcgtgctcgagggccgcggcgtctgcctcgttgaccggctctcccttgtcgagtccgttgaagggtccgaggtacttgtagccaggaagcaccagaccccggccgtcgtcctgcttttgctggttggctttgggtttcggggctccaggtttcaagtcccaccactcgcgaatgccctcagagaggttgtcctcgagccaatctggaagataaccatcggcagccatacctggtttaagtcatttattgctcagaaacacagtcatccaggtccacgttgaccagatcgcaggccgagcaagcaatctcgggagcccgccccagcagatgatgaatggcacagagtttccgatacgtcctctttctgacgaccggttgagattctgacacgccggggaaacattctgaacagtctctggtcccgtgcgtgaagcaaatgttgaaattctgattcattctctcgcatgtcttgcagggaaacagcatctgaagcatgcccgcgtgacgagaacatttgttttggtacctgtcggcaaagtccaccggagctccttccgcgtctgacgtcgatggatccgcgactgaggggcaggcccgcttgggctcgcttttatccgcgtcatcgggggcgggcctcttgttggctccaccctttctgacgtagaactcatgcgccacctcggtcacgtgatcctgcgcccagcggaagaactctttgacttcctgctttgtcaccttgccaaagtcctgctccagacggcgggtgagttcaaatttgaacatccggtcttgtaacggctgctggtgctcgaaggtggtgctgttcccgtcaatcacggcgcacatgttggtgttggaagtgacgatcacgggggtgggatcgatctgggcggacgacttgcacttttggtccacgcgcaccttgctgccgccgagaatggccttggcggactccacgaccttggccgtcatcttgccctcctcccaccagatcaccatcttgtcgacgcaatcgttgaagggaaagttctcattggtccagttgacgcagccgtagaaagggcgaattc

SEQ ID NO: 155 - DNA, 2187 bp, Artificial Sequence
  Synthetic polynucleotide
atggctgccgatggttatcttccagattggctcgagggcaacctctctgagggcattcgcgagtggtgggacttgaaacctggagccccgaaacccaaagccaaccagcaaaagcaggacgacggccggggtctggtgcttcctggctacaggtacctcggacccttcaacggactcgacaagggagagccggtcaacgaggcagacgccgcggccctcgagcacgacaaggcctacgacaagcagctcgagcagggggacaacccgtacctcaagtacaaccacgccgacgccgagtttcaggagcgtcttcaagaagatacgtcttttgggggcaacctcgggcgagcagtcttccaggccaagaagcgggttctcgaacctctcggtctggttgaggaaggcgctaagacggctcctggaaagaagagacccatagaatcccccgactcctccacgggcatcggcaagaacggccagccgcccgctaaaaagaagctcaactttgggcagactggcgactcagagtcagtgcccgacccccaacctctcggagaacctcccgccgcgccctcaggtctgggatctggtacaatggctgcaggcggtggcgcaccaatggcagacaataacgaaggcgccgacggagtgggtaatgcctccggaaattggcattgcgattccacatggctgggcgacagagtcatcaccaccagcacccgcacctgggccctgcccacctacaacaaccacctctacaagcagatatcaagtcagagcggggctaccaacgacaaccacttcttcggctacagcaccccctggggctattttgacttcaacagattccactgccacttctcaccacgtgactggcagcgactcatcaacaacaactggggattccggcccagaaagctgcggttcaagttgttcaacatccaggtcaaggaggtcacgacgaacgacggcgttacgaccatcgctaataaccttaccagcacgattcaggtcttctcggactcggagtaccaactgccgtacgtcctcggctctgcgcaccagggctgcctccctccgttccctgcggacgtgttcatgattcctcagtacggatatctgactctaaacaacggcagtcagtctgtgggacgttcctccttctactgcctggagtactttccttctcagatgctgagaacgggcgataactttgaattcagctacacctttgaggaagtgcctttccacagcagctatgcgcacagccagagcctggaccggctgatgaatcccctcatcgaccagtacctgtactacctggcccggacccagagcactacggggtccacaagggagctgcagttccatcaggctgggcccaacaccatggccgagcaatcaaagaactggctgcccggaccctgttatcggcagcagagactgtcaaaaaacatagacagcaacaacaacagtaactttgcctggaccggggccactaaataccatctgaatggtagaaattcattaaccaacccgggcgtagccatggccaccaacaaggacgacgaggaccagttctttcccatcaacggagtgctggtttttggcaaaacgggggctgccaacaagacaacgctggaaaacgtgctaatgaccagcgaggaggagatcaaaaccaccaatcccgtggctacagaagaatacggtgtggtctccagcaacctgcaatcgtctacggccggaccccagacacagactgtcaacagccagggggctctgcccggcatggtctggcagaaccgggacgtgtacctgcagggtcccatctgggccaaaattcctcacacggacggcaactttcacccgtctcccctgatgggcggatttggactcaaacacccgcctcctcaaattctcatcaaaaacaccccggtacctgctaatcctccagaggtgtttactcctgccaagtttgcctcatttatcacgcagtacagcaccggccaggtcagcgtggagatcgagtgggaactgcagaaagaaaacagcaaacgctggaatccagagattcagtacacctcaaattatgccaagtctaataatgtggaatttgctgtcaacaacgaaggggtttatactgagcctcgccccattggcacccgttacctcacccgtaacctgtaa

SEQ ID NO: 156 - protein, 728 aa, Artificial Sequence; identical to SEQ ID NO: 151
  Synthetic polypeptide

SEQ ID NO: 157 - protein, 728 aa, Artificial Sequence
  Synthetic polypeptide
MAADGYLPDWLEDNLSEGIREWWDLKPGAPKPKANQQKQDDGRGLVLPGYRYLGPFNGLDKGEPVNEADAAALEHDKAYDKQLEQGDNPYLKYNHADAEFQERLQEDTSFGGNLGRAVFQAKKRVLEPLGLVEEGAKTAPGKKRPIESPDSSTGIGKNGQPPAKKKLNFGQTGDSESVPDPQPLGEPPAAPSGLGSGTMAAGGGAPMADNNEGADGVGNASGNWHCDSTWLGDRVITTSTRTWALPTYNNHLYKQISSQSGATNDNHFFGYSTPWGYFDFNRFHCHFSPRDWQRLINNNWGFRPRKLRFKLFNIQVKEVTTNDGVTTIANNLTSTIQVFSDSEYQLPYVLGSAHQGCLPPFPADVFMIPQYGYLTLNNGSQSVGRSSFYCLEYFPSQMLRTGDNFEFSYTFEEVPFHSSYAHSQSLDRLMNPLIDQYLYYLARTQSTTGSTRELQFHQAGPNTMAEQSKNWLPGPCYRQQRLSKNIDSNNNSNFAWTGATKYHLNGRNSLTNPGVAMATNKDDEDQFFPINGVLVFGKTGAANKTTLENVLMTSEEEIKTTNPVATEEYGVVSSNLQSSTAGPQTQTVNSQGALPGMVWQNRDVYLQGPIWAKIPHTDGNFHPSPLMGGFGLKHPPPQILIKNTPVPANPPEVFTPAKFASFITQYSTGQVSVEIEWELQKENSKRWNPEIQYTSNYAKSNNVEFAVNNEGVYTEPRPIGTRYLTRNL

SEQ ID NO: 158 - protein, 728 aa, Artificial Sequence; identical to SEQ ID NO: 150
  Synthetic polypeptide

SEQ ID NO: 159 - protein, 728 aa, Artificial Sequence
  Synthetic polypeptide
MAADGYLPDWLEDNLSEGIREWWDLKPGAPKPKANQQKQDDGRGLVLPGYKYLGPFNGLDKGEPVNEADAAALEHDKAYDKQLEQGDNPYLKYNHADAEFQERLQEDTSFGGNLGRAVFQAKKRVLEPLGLVEEGAKTAPGKKRPIESPDSSTGIGKNGQPPAKKKLNFGQTGDSESVPDPQPLGEPPAAPSGLGSGTMAAGGGAPMADNNEGADGVGNASGNWHCDSTWLGDRVITTSTRTWALPTYNNHLYKQISSQSGATNDNHFFGYSTPWGYFDFNRFHCHFSPRDWQRLINNNWGFRPRKLRFKLFNIQVKEVTTNDGVTTIANNLTSTIQVFSDSEYQLPYVLGSAHQGCLPPFPADVFMIPQYGYLTLNNGSQSVGRSSFYCLEYFPSQMLRTGNNFEFSYTFEEVPFHSSYAHSQSLDRLMNPLIDQYLYYLARTQSTTGSTRELQFHQAGPNTMAEQSKNWLPGPCYRQQRLSKNIDSNNNSNFAWTGATKYHLNGRNSLTNPGVAMATNKDDEDQFFPINGVLVFGKTGAANKTTLENVLMTSEEEIKTTNPVATEEYGVVSSNLQSSTAGPQTQTVNSQGALPGMVWQNRDVYLQGPIWAKIPHTDGNFHPSPLMGGFGLKHPPPQILIKNTPVPANPPEVFTPAKFASFITQYSTGQVSVEIEWELQKENSKRWNPEIQYTSNYAKSNNVEFAVNNEGVYTEPRPIGTRYLTRNL

SEQ ID NO: 160 - protein, 728 aa, Artificial Sequence
  Synthetic polypeptide
MAADGYLPDWLEDNLSEGIREWWDLKPGAPKPKANQQKQDDGRGLVLPGYKYLGPFNGLDKGEPVNEADAAALEHDKAYDKQLEQGDNPYLKYNHADAEFQERLQEDTSFGGNLGRAVFQAKKRVLEPLGLVEEGAKTAPGKKRPIESPDSSTGIGKKGQQPAKKKLNFGQTGDSESVPDPQPLGEPPAAPSGLGSGTMAAGGGAPMADNNEGADGVGNASGNWHCDSTWLGDRVITTSTRTWALPTYNNHLYKQISSQSGATNDNHFFGYSTPWGYFDFNRFHCHFSPRDWQRLINNNWGFRPRKLRFKLFNIQVKEVTTNDGVTTIANNLTSTIQVFSDSEYQLPYVLGSAHQGCLPPFPADVFMIPQYGYLTLNNGSQSVGRSSFYCLEYFPSQMLRTGNNFEFSYTFEEVPFHSSYAHSQSLDRLMNPLIDQYLYYLARTQSTTGSTRELQFHQAGPNTMAEQSKNWLPGPCYRQQRLSKNIDSNNNSNFAWTGATKYHLNGRNSLTNPGVAMATNKDDEDQFFPINGVLVFGKTGAANKTTLENVLMTSEEEIKTTNPVATEEYGVVSSNLQSSTAGPQTQTVNSQGALPGMVWQNRDVYLQGPIWAKIPHTDGNFHPSPLMGGFGLKHPPPQILIKNTPVPANPPEVFTPAKFASFITQYSTGQVSVEIEWELQKENSKRWNPEIQYTSNYAKSNNVEFAVNNEGVYTEPRPIGTRYLTRNL

SEQ ID NO: 161 - DNA, 2215 bp, Artificial Sequence
  Synthetic polynucleotide
atggctgccgatggttatcttccagattggctcgaggacactctctctgaaggaataagacagtggtggaagctcaaacctggcccaccaccaccaaagcccgcagagcggcataaggacgacagcaggggtcttgtgcttcctgggtacaagtacctcggacccttcaacggactcgacaagggagagccggtcaacgaggcagacgccgcggccctcgagcacgacaaagcctacgaccggcagctcgacagcggagacaacccgtacctcaagtacaaccacgccgacgccgagttccaggagcggctcaaagaagatacgtcttttgggggcaacctcgggcgagcagtcttccaggccaaaaagaggcttcttgaacctcttggtctggttgaggaagcggctaagacggctcctggaaagaagaggcctgtagagcactctcctgtggagccagactcctcctcgggaaccggaaaggcgggccagcagcctgcaagaaaaagattgaattttggtcagactggagacgcagactcagtcccagaccctcaaccaatcggagaacctcccgcagccccctcaggtgtgggatctcttacaatggctgcaggcggtggcgcaccaatggcagacaataacgagggcgccgacggagtgggtaattcctcgggaaattggcattgcgattccacatggatgggcgacagagtcatcaccaccagcacccgaacctgggccctgcccacctacaacaaccacctctacaagcaaatctccaacagcacatctggaggatcttcaaatgacaacgcctacttcggctacagcaccccctgggggtattttgactttaacagattccactgccacttttcaccacgtgactggcagcgactcatcaacaacaactggggattccggcccaagagactcagcttcaagctcttcaacatccaggtcaaggaggtcacgcagaatgaaggcaccaagaccatcgccaataacctcaccagcaccatccaggtgtttacggactcggagtaccagctgccgtacgttctcggctctgcccaccagggctgcctgcctccgttcccggcggacgtgttcatgattccccagtacggctacctaacactcaacaacggtagtcaggccgtgggacgctcctccttctactgcctggaatactttccttcgcagatgctgagaaccggcaacaacttccagtttacttacaccttcgaggacgtgcctttccacagcagctacgcccacagccagagcttggaccggctgatgaatcctctgattgaccagtacctgtactacttgtctcggactcaaacaacaggaggcacgacaaatacgcagactctgggcttcagccaaggtgggcctaatacaatggccaatcaggcaaagaactggctgccaggaccctgttaccgccagcagcgagtatcaaagacatctgcggataacaacaacagtgaatactcgtggactggagctaccaagtaccacctcaatggcagagactctctggtgaatccgggcccggccatggcaagccacaaggacgatgaagaaaagtttttttcctcagagcggggttctcatctttgggaagcaaggctcagagaaaacaaatgtggacattgaaaaggtcatgattacagacgaagaggaaatcaggacaaccaatcccgtggctacggagcagtatggttctgtatctaccaacctccagagaggcaacagacaagcagctaccgcagatgtcaacacacaaggcgttcttccaggcatggtctggcaggacagagatgtgtaccttcaggggcccatctgggcaaagattccacacacggacggacattttcacccctctcccctcatgggtggattcggacttaaacaccctccgcctcagatcctgatcaagaacacgcctgtacctgcggatcctccgaccaccttcaaccagtcaaagctgaactctttcatcacccagtattctactggccaagtcagcgtggagatcgagtgggagctgcagaaggaaaacagcaagcgctggaaccccgagatccagtacacctccaactactacaaatctacaagtgtggactttgctgttaatacagaaggcgtgtactctgaaccccgccccattggcacccgttacctcacccgtaatctgtaa

SEQ ID NO: 162 - protein, 737 aa, Artificial Sequence
  Synthetic polypeptide
MAADGYLPDWLEDTLSEGIRQWWKLKPGPPPPKPAERHKDDSRGLVLPGYKYLGPFNGLDKGEPVNEADAAALEHDKAYDRQLDSGDNPYLKYNHADAEFQERLKEDTSFGGNLGRAVFQAKKRLLEPLGLVEEAAKTAPGKKRPVEHSPVEPDSSSGTGKAGQQPARKRLNFGQTGDADSVPDPQPIGEPPAAPSGVGSLTMAAGGGAPMADNNEGADGVGNSSGNWHCDSTWMGDRVITTSTRTWALPTYNNHLYKQISNSTSGGSSNDNAYFGYSTPWGYFDFNRFHCHFSPRDWQRLINNNWGFRPKRLSFKLFNIQVKEVTQNEGTKTIANNLTSTIQVFTDSEYQLPYVLGSAHQGCLPPFPADVFMIPQYGYLTLNNGSQAVGRSSFYCLEYFPSQMLKTGNNFQFTYTFEDVPFHSSYAHSQSLDRLMNPLIDQYLYYLSRTQTTGGTTNTQTLGFSQGGPNTMANQAKNWLPGPCYRQQRVSKTSADNNNSEYSWTGATKYHLNGRDSLVNPGPAMASHKDDEEKFFPQSGVLIFGKQGSEKTNVDIEKVMITDEEEIRTTNPVATEQYGSVSTNLQRGNRQAATADVNTQGVLPGMVWQDRDVYLQGPIWAKIPHTDGHFHPSPLMGGFGLKHPPPQILIKNTPVPADPPTTFNQSKLNSFITQYSTGQVSVEIEWELQKENSKRWNPEIQYTSNYYKSTSVDFAVNTEGVYSEPRPIGTRYLTRNL

SEQ ID NO: 163 - protein, 737 aa, Artificial Sequence
  Synthetic polypeptide
MAADGYLPDWLEDTLSEGIRQWWKLKPGPPPPKPAERHKDDSRGLVLPGYKYLGPFNGLDKGEPVNEADAAALEHDKAYDRQLDSGDNPYLKYNHADAEFQERLKEDTSFGGNLGRAVFQAKKRLLEPLGLVEEAAKTAPGKKRPVEHSPVEPDSSSGTGKAGQQPARKRLNFGQTGDADSVPDPQPIGEPPAAPSGVGSLTMAAGGGAPMADNNEGADGVGNSSGNWHCDSTWMGDRVITTSTRTWALPTYNNHLYKQISNSTSGGSSNDNAYFGYSTPWGYFDFNRFHCHFSPRDWQRLINNNWGFRPKRLSFKLFNIQVKEVTQNEGTKTIANNLTSTIQVFTDSEYQLPYVLGSAHQGCLPPFPADVFMIPQYGYLTLNNGSQAVGRSSFYCLEYFPSQMLKTGNNFQFTYTFEDVPFHSSYAHSQSLDRLMNPLIDQYLYYLSRTQTTGGTTNTQTLGFSQGGPNTMANQAKNWLPGPCYRQQRVSKTSADNNNSEYSWTGATKYHLNGRDSLVNPGPAMASHKDDEEKFFPQSGVLIFGKQGSEKTNVDIEKVMITDEEEIRTTNPVATEQYGSVSTNLQQGNTQAATADVNTQGVLPGMVWQDRDVYLQGPIWAKIPHTDGHFHPSPLMGGFGLKHPPPQILIKNTPVPADPPTTFNQSKLNSFITQYSTGQVSVEIEWELQKENSKRWNPEIQYTSNYYKSTSVDFAVNTEGVYSEPRPIGTRYLTRNL

SEQ ID NO: 164 - protein, 737 aa, Artificial Sequence
  Synthetic polypeptide
MAADGYLPDWLEDTLSEGIRQWWKLKPGPPPPKPAERHKDDSRGLVLPGYKYLGPFNGLDKGEPVNEADAAALEHDKAYDRQLDSGDNPYLKYNHADAEFQERLKEDTSFGGNLGRAVFQAKKRLLEPLGLVEEAAKTAPGKKRPVEHSPVEPDSSSGTGKAGQQPARKRLNFGQTGDADSVPDPQPIGEPPAAPSGVGSLTMAAGGGAPMADNNEGADGVGNSSGNWHCDSTWMGDRVITTSTRTWALPTYNNHLYKQISNSTSGGSSNDNAYFGYSTPWGYFDFNRFHCHFSPRDWQRLINNNWGFRPKRLSFKLFNIQVKEVTQNEGTKTIANNLTSTIQVFTDSEYQLPYVLGSAHQGCLPPFPADVFMIPQYGYLTLNNGSQAVGRSSFYCLEYFPSQMLRTGNNFQFTYTFEDVPFHSSYAHSQSLDRLMNPLIDQYLYYLSRTQTTGGTTNTQTLGFSQGGPNTMANQAKNWLPGPCYRQQRVSKTSADNNNSEYSWTGATKYHLNGRDSLVNPGPAMASHKDDEEKFFPQSGVLIFGKQGSEKTNVDIEKVMITDEEEIRTTNPVATEQYGSVSTNLQQGNTQAATADVNTQGVLPGMVWQDRDVYLQGPIWAKIPHTDGHFHPSPLMGGFGLKHPPPQILIKNTPVPADPPTTFNQSKLNSFITQYSTGQVSVEIEWELQKENSKRWNPEIQYTSNYYKSTSVDFAVNTEGVYSEPRPIGTRYLTRNL

SEQ ID NO: 165 - protein, 729 aa, Artificial Sequence
  Synthetic polypeptide
MAADGYLPDWLEDNLSEGIREWWDLKPGAPKPKANQQKQDDGRGLVLPGYKYLGPFNGLDKGEPVNAADAAALEHDKAYDQQLKAGDNPYLRYNHADAEFQERLQEDTSFGGNLGRAVFQAKKRVLEPLGLVEEGAKTAPGKKRPIDSPDSSTGIGKKGQQPAKKKLNFGQTGDSESVPDPQPLGEPPAAPSSVGSGTMAAGGGAPTADNNEGADGVGNASGNWHCDSTWLGDRVITTSTRTWALPTYNNHLYKQISSSSSGATNDNHYFGYSTPWGYFDFNRFHCHFSPRDWQRLINNNWGFRPKKLRFKLFNIQVKEVTTNDGVTTIANNLTSTVQVFSDSEYQLPYVLGSAHQGCLPPFPADVFMIPQYGYLTLNNGSQSVGRSSFYCLEYFPSQMLRTGNNFEFSYSFEDVPFHSSYAHSQSLDRLMNPLIDQYLYYLARTQSTTGSTRELQFHQAGPNTMAEQSKNWLPGPCYRQQRLSKNLDFNNNSNFAWTAATKYHLNGRNSLTNPGIPMATNKDDEDQFFPINGVLVFGKTGAANKTTLENVLMTSEEEIKTTNPVATEEYGVVSSNLQSSTAGPQSQTINSQGALPGMVWQNRDVYLQGPIWAKIPHTDGNFHPSPLMGGFGLEHPPPQILIKNTPVPANPPEVFTPAKFASFITQYSTGQVSVEIEWELQKENSKRWNPEIQYTSNYAKSNNVEFAVNPDGVYTEPRPIGTRYLTRNL

SEQ ID NO: 166 - DNA, 3075 bp, Artificial Sequence
  Synthetic polynucleotide
tgagaactttcctttcaacgattgcgtcggacaagatggtgatctggtgggaggaggggaagatgaccgccaaggtcgtggagtcggccaaagccattcttggaggaagcaaggtgcgtgtggaccagaaatgcaagtcctcggcccagatagacccgactcccgtgatcgtcacctccaacaccaacatgtgcgccgtgattgacgggaactcaacgaccttcgagcaccagcagccgttgcaagaccggatgttcaaatttgaacttacccgccgtctggatcatgactttggaaaggtcaccaagcaggaagtgaaagactttttccggtgggcaaaggatcacgtggttgaggtggagcatgaattctacgtcaaaaagggtggagctaagaaaagacccgcccccagtgacgcagatataagtgagcccaaacgggcgcgcgagtcagttgcgcagccatcaacgtcagacgcggaagcttcgatcaactacgcggacaggtaccaaaaacaaatgttctcgtcacgtgggcatgaatctgatgctgtttccctgcagacaatgcgagagaatgaatcagaattcaaatatctgcttcactcacggacagaaagactgtttagagtgctttcccgtgtcagaatctcaacccgtttctgtcgtcaaaaaggcgtatcagaaactgtgctacattcatcatatcatgggaaaggtgccagacgcttgcactgcctgcgatctggtcaatgtggatttggatgactgcatctctgaacaataaatgatttaaatcaggtatggctgccgatggttatcctccagattggctcgaggacactctctctgaagggataagacagtggtggaagctcaaacctggcccaccaccaccaaagcccgcagagcggcataaggacgacagcaggggtcttgtgcttcctgggtacaagtacctcggacccttcaacggactcgacaagggggagccggtcaacgaggcagacgccgcggccctcgagcacgacaaggcctacgaccggcagctcgacagcggagacaacccgtacctcaagtacaaccacgccgacgcagagtttcaggagcgccttaaagaagatacgtcttttgggggcaacctcggacgagcagtcttccaggcgaaaaagagggttcttgaacctctgggcctggttgaggaacctgttaagacggctccgggaaaaaagaggccggtagagcactctcctgtggagccagactcctcctcgggaaccggaaaagcgggccagcggcctgcaagaaaaagattaaattttggtcagactggagacgcagactccgtacctgacccccagcctctcggacagccaccagcagccccctctggtctgggatctactacaatggctacaggcagtggcgcaccaatggcagacaataacgagggtgccgatggagtgggtaattcctcaggaaattggcattgcgattcccaatggctgggcgacagagtcatcaccaccagcacccgaacctgggccctgcccacatacaacaaccacctctacaagcaaatctccagccaatcaggagccagcaacgacaaccactactttggctacagcaccccctgggggtattttgacttcaacagattccactgccacttttcaccacgtgactggcaaagactcatcaacaacaactggggattccggcccaaaagactcaacttcaagctctttaatattcaagtcaaagaggtcacgcagaatgacggtacgacgacgattgccaataaccttaccagcacggttcaggtgtttactgactcggagtaccagctcccgtacgtcctgggctcggcgcatcaaggatgcctcccgccgtttccagcggacgtcttcatggtcccacagtatggatacctcaccctgaacaacgggagtcaggcggtaggacgctcttccttttactgcctggagtactttccttctcagatgctgcgtactggaaacaactttcagttcagctacacttttgaagacgtgcctttccacagcagctacgctcacagccagagtctggatcggctgatgaatcctctgatcgaccagtacctgtattatctgaacaagacacaaacaaatagtggaactcttcagcagtctcggctactgtttagccaagctggaccaaccaacatgtctcttcaagctaaaaactggctgcctggaccttgctacagacagcagcgtctgtcaaaacaggcaaacgacaacaacaacagcaactttccctggactgcagctacaaagtatcatctaaatggccgggactcgttggttaatccaggaccagctatggccagtcacaaggatgacgaagaaaagtttttccccatgcatggaaccctgatatttggtaaacaaggaacaaatgccaacgacgcggatttggaaaatgtcatgattacagatgaagaagaaatcagggccaccaatcccgtggctacggagcagtacgggactgtgtcaaataatttgcaaaactcaaacactggtccaactactggaactgtcaatcgccaaggagcgttacctggtatggtgtggcaggatcgagacgtgtacctgcagggacccatttgggccaagattcctcacaccgatggacactttcatccttctccactgatgggaggttttggactcaaacacccgcctcctcagatcatgatcaaaaacactcccgttccagccaatcctcccacaaacttcagttctgccaagtttgcttctttcatcacacagtattccacgggacaggtcagcgtggagatcgagtgggagctgcagaaggagaacagcaaacgctggaatcccgaaattcagtacacttccaactacaacaagtctgttaatgtggactttactgtggacactaatggtgtgtattcagagcctcgccccattggcaccagatacctgactcgtaatctgtaattgcttgttaatcaataaaccgtttaattcgtttcagttgaactttggtctctgcgaagggcgaa

SEQ ID NO: 167 - DNA, 3142 bp, Artificial Sequence
  Synthetic polynucleotide
aaaacgacgggccagtgattgtaatacgactcactatagggcgaaattgaaattagcggccgcgaattcgcctttcgcagagaccaaagttcaactgaaacgaattaaacggtttattgattaacaagcaattacagattacgagtcaggtatctggtgccaatggggcgaggctctgaatacacaccattagtgtccacagtaaagtccacattaacagacttgttgtagttggaagtgtactgaatttcgggattccagcgtttgctgttctccttctgcagctcccactcgatctccacgctgacctgtcccgtggaatactgtgtgatgaaagaagcaaacttggcagaactgaagtttgtgggaggattggctggaacgggagtgtttttgatcatgatctgaggaggcgggtgtttgagtccaaaacctcccatcagtggagaaggatgaaagtgtccatcggtgtgaggaatcttggcccaaatgggtccctgcaggtacacgtctcgatcctgccacaccataccaggtaacgctccttggtgattgacagttccagtagttggaccagtgtttgagttttgcaaattatttgacacagtcccgtactgctccgtagccacgggattggtggccctgatttcttcttcatctgtaatcatgacattttccaaatccgcgtcgttggcatttgttccttgtttaccaaatatcagggttccatgcatggggaaaaacttttcttcgtcatccttgtgactggccatagctggtcctggattaaccaacgagtcccggccatttagatgatactttgtagctgcagtccagggaaagttgctgttgttgttgtcgtttgcctgttttgacagacgctgctgtctgtagcaaggtccaggcagccagtttttagcttgaagagacatgttggttggtccagcttggctaaacagtagccgagactgctgaagagttccactatttgtttgtgtcttgttcagataatacaggtactggtcgatcagaggattcatcagccgatccagactctggctgtgagcgtagctgctgtggaaaggcacgtcttcaaaagtgtagctgaactgaaagttgtttccagtacgcagcatctgagaaggaaagtactccaggcagtaaaaggaagagcgtcctaccgcctgactcccgttgttcagggtgaggtatccatactgtgggaccatgaagacgtccgctggaaacggcgggaggcatccttgatgcgccgagcccaggacgtacgggagctggtactccgagtcagtaaacacctgaaccgtgctggtaaggttattggcaatcgtcgtcgtaccgtcattctgcgtgacctctttgacttgaatattaaagagcttgaagttgagtcttttgggccggaatccccggttgttgttgacgagtctttgccagtcacgtggtgaaaagtggcagtggaatctgttgaagtcaaaatacccccagggggtgctgtagccaaagtagtggttgtcgttgctggctcctgattggctggagatttgcttgtagaggtggttgttgtatgtgggcagggcccaggttcgggtgctggtggtgatgactctgtcgcccagccattgggaatcgcaatgccaatttcctgaggaattacccactccatcggcaccctcgttattgtctgccattggtgcgccactgcctgtagccattgtagtagatcccagaccagagggggctgctggtggctgtccgagaggctgggggtcaggtacggagtctgcgtctccagtctgaccaaaatttaatctttttcttgcaggctgctggcccgcttttccggttcccgaggaggagtctggctccacaggagagtgctctaccggcctcttttttcccggagccgtcttaacaggctcctcaaccaggcccagaggttcaagaaccctctttttcgcctggaagactgctcgtccgaggttgcccccaaaagacgtatcttctttaaggcgctcctgaaactctgcgtcggcgtggttgtacttgaggtacgggttgtctccgctgtcgagctgccggtcgtaggccttgtcgtgctcgagggccgcggcgtctgcctcgttgaccggctcccccttgtcgagtccgttgaagggtccgaggtacttgtacccaggaagcacaagacccctgctgtcgtccttatgccgctctgcgggctttggtggtggtgggccaggtttgagcttccaccactgtcttattccttcagagagagtgtcctcgagccaatctggaagataaccatcggcagccatacctgatttaaatcatttattgttcagagatgcagtcatccaaatccacattgaccagatcgcaggcagtgcaagcgtctggcacctttcccatgatatgatgaatgtagcacagtttctgatacgcctttttgacgacagaaacgggttgagattctgacacgggaaagcactctaaacagtctttctgtccgtgagtgaagcagatatttgaattctgattcattctctcgcattgtctgcagggaaacagcatcagattcatgcccacgtgacgagaacatttgttttggtacctgtccgcgtagttgatcgaagcttccgcgtctgacgtcgatggctgcgcaactgactcgcgcgcccgtttgggctcacttatatctgcgtcactgggggcgggtcttttcttagctccaccctttttgacgtagaattcatgctccacctcaaccacgtgatcctttgcccaccggaaaaagtctttcacttcctgcttggtgacctttccaaagtcatgatccagacggcgggtaagttcaaatttgaacatccggtcttgcaacggctgctggtgctcgaaggtcgttgagttcccgtcaatcacggcgcacatgttggtgttggaggtgacgatcacgggagtcgggtctatctgggccgaggacttgcatttctggtccacacgcaccttgcttcctccaagaatggctttggccgactccacgaccttggcggtcatcttcccctcctcccaccagatcaccatcttgtcgacgcaatggtaaaaggaaagttctcattgg

SEQ ID NO: 168 - protein, 735 aa, Adeno-associated virus 2
MAADGYLPDWLEDTLSEGIRQWWKLKPGPPPPKPAERHKDDSRGLVLPGYKYLGPFNGLDKGEPVNEADAAALEHDKAYDRQLDSGDNPYLKYNHADAEFQERLKEDTSFGGNLGRAVFQAKKRVLEPLGLVEEPVKTAPGKKRPVEHSPVEPDSSSGTGKAGQQPARKRLNFGQTGDADSVPDPQPLGEPPATPAAVGPTTMASGGGAPMADNNEGADGVGNASGNWHCDSTWLGDRVITTSTRTWALPTYNNHLYKQISSASTGASNDNHYFGYSTPWGYFDFNRFHCHFSPRDWQRLINNNWGFRPKRLNFKLFNIQVKEVTQNDGTTTIANNLTSTVQVFTDSEYQLPYVLGSAHQGCLPPFPADVFMIPQYGYLTLNNGSQAVGRSSFYCLEYFPSQMLRTGNNFTFSYTFEDVPFHSSYAHSQSLDRLMNPLIDQYLYYLNRTQNQSGSAQDKALLFSRGSPAGMSVQPKNWLPGPCYRQQRVSKTKTDNNNSNFTWTGASKYNLNGRESIINPGTAMASHKDDKDKFFPMSGVMIFGKESAGASNTALDNVMITDEEEIKATNPVATERFGTVAVNFQSSSTDPATGDVHVMGALPGMVWQDRDVYLQGPIWAKIPHTDGHFHPSPLMGGFGLKHPPPQILIKNTPVPANPPAEFSATKFASFITQYSTGQVSVEIEWELQKENSKRWNPEVQYTSNYAKSANVDFTVDNNGLYTEPRPIGTRYLTRP

SEQ ID NO: 169 - protein, 740 aa, Adeno-associated virus 2
MAADGYLPDWLEDTLSEGIRQWWKLKPGPPPPKPAERHKDDSRGLVLPGYKYLGPFNGLDKGEPVNAADAAALEHDKAYDRQLDSGDNPYLKYNHADAEFQERLKEDTSFGGNLGRAVFQAKKRVLEPLGLVEEPVKTAPGKKRPVEHSPVEPDSSSGTGKAGQQPARKRLNFGQTGDADSVPDPQPLGQPPAAPSGLGTNTMATGSGAPMADNNEGADGVGNSSGNWHCDSTWMGDRVITTSTRTWALPTYNNHLYKQISSQSGASNDNHYFGYSTPWGYFDFNRFHCHFSPRDWQRLINNNWGFRPKRLNFKLFNIQVKEVTQNDGTTTIANNLTSTVQVFTDSEYQLPYVLGSAHQGCLPPFPADVFMVPQYGYLTLNNGSQAVGRSSFYCLEYFPSQMLRTGNNFTFSYTFEDVPFHSSYAHSQSLDRLMNPLIDQYLYYLSRTNTPSGTTTQSGLQFSQAGASDIRDQSRNWLPGPCYRQQRVSKTSADNNNSEYSWTGATKYHLNGRDSLVNPGPAMASHKDDEEKFFPQSGVLIFGKQGSEKTNVDIEKVMITDEEEIRTTNPVATEQYGSVSTNLQRGNRQAATADVNTQGVLPGMVWQDRDVYLQGPIWAKIPHTDGHFHPSPLMGGFGLKHPPPQILIKNTPVPANPSTTFSAAKFASFITQYSTGQVSVEIEWELQKENSKRWNPEIQYTSNYNKSVNVDFTVDTNGVYSEPRPIGTRYLTRNLLLAAA

SEQ ID NO: 170 - protein, 734 aa, Adeno-associated virus 2
MAADGYLPDWLEDTLSEGIRQWWKLKPGPPPPKPAERHKDDSRGLVLPGYKYLGPFNGLDKGEPVNEADAAALEHDKAYDRQLDSGDNPYLKYNHADAEFQERLKEDTSFGGNLGRAVFQAKKRVLEPLGLVEEPVKTAPGKKRPVEHSPVEPDSSSGTGKAGQQPARKRLNFGQTGDADSVPDPQPLGQPPAAPSGLGTNTMATGSGAPMADNNEGADGVGNSSGNWHCDSTWMGDRVITTSTRTWALPTYNNHLYKQISSQSGASNDNHYFGYSTPWGYFDFNRFHCHFSPRDWQRLINNNWGFRPKRLNFKLFNIQVKEVTQNDGTTTIANNLTSTVQVFTDSEYQLPYVLGSAHQGCLPPFPADVFMVPQYGYLTLNNGSQAVGRSSFYCLEYFPSQMLRTGNNFTFSYTFEDVPFHSSYAHSQSLDRLMNPLIDQYLYYLSRTNTPSGTTTQSGLQFSQAGASDIRDQSRNWLPGPCYRQQRVSKTSADNNNSEYSWTGATMYHLNGRDSLVNPGPAMASHKDDEEKFFPQSGVLIFGKQGSEKTNVDIEKVMITDEEEIRTTNPVATEQYGSVSTNLQRGNRQAATADVNTQGVLPGMVWQDRDVYLQGPIWAKIPHTDGHFHPSPLMGGFGLKHPPPQILIKNTPVPANPSTTFSAAKFASFITQYSTGQVSVEIEWELQKENSKRWNPEIQYTSNYNKSINVDFTVDTNGVYSEPRPIGTRYLTRN

SEQ ID NO: 171 - protein, 734 aa, Adeno-associated virus 2
MAADGYLPDWLEDTLSEGIRQWWKLKPGPPPPKPAERHKDDSRGLVLPGYKYLGPFNGLDKGEPVNEADAAALEHDKAYDRQLDSGDNPYLKYNHADAEFQERLKEDTSFGGNLGRAVFQAKKRVLEPLGLVEEPVKTAPGKKRPVEHSPVEPDSSSGTGKAGQQPARKRLNFGQTGDADSVPDPQPLGQPPAAPSGLGTNTMATGSGAPMADNNEGADGVGNSSGNWHCDSTWMGDRVITTSTRTWALPTYNNHLYKQISSQSGASNDNHYFGYSTPWGYFDFNRFHCHFSPRDWQRLINNNWGFRPKRLNFKLFNIQVKEVTQNDGTTTIANNLTSTVQVFTDSEYQLPYVLGSAHQGCLPPFPADVFMVPQYGYLTLNNGSQAVGRSSFYCLEYFPSQMLRTGNNFTFSYTFEDVPFHSSYAHSQSLDRLMNPLIDQYLYYLSRTNTPSGTTTQSGLQFSQAGASDIRDQSRNWLPGPCYRQQRVSKTSADNNNSEYSWTGATKYHLNGRDSLVNPGPAMASHKDDEEKFFPQSGVLIFGKQGSEKTNVDIEKVMITDEEEIRTTNPVATEQYGSVSTNLQRGNRQAATADVNTQGVLPGMVWQDRDVYLQGPIWAKIPHTDGHFHPSPLMGGFGLKHPPPQILIKNTPVPANPSTTFSEAKFASFITQYSTGQVSVEIEWELQKENSKRWNPEIQYTSNYNKSVNVDFTVDTNGVYSEPRPIGTRYLTRN

SEQ ID NO: 172 - protein, 739 aa, Adeno-associated virus 2
MAADGYLPDWLEDTLSEGIRQWWKLKPGPPPPKPAERHKDDSRGLVLPGYKYLGPFNGLDKGEPVNEADAAALEHDKAYDRQLDSGDNPYLKYNHADAEFQERLKEDTSFGGNLGRAVFQAKKRVLEPLGLVEEPVKTAPGKKRPVEHSPVEPDSSSGTGKAGQQPARKRLNFGQTGDADSVPDPQPLGQPPAAPSGLGTNTMATGSGAPMADNNEGADGVGNSSGNWHCDSTWMGDRVITTSTRTWALPTYNNHLYKQISSQSGASNDNHYFGYSTPWGYFDFNRFHCHFSPRDWQRLINNNWGFRPKRLNFKLFNIQVKEVTQNDGTTTIANNLTSTVQVFTDSEYQLPYVLGSAHQGCLPPFPADVFMVPQYGYLTLNNGSQAVGRSSFYCLEYFPSQMLRTGNNFTFSYTFEDVPFHSSYAHSQSLDRLMNPLIDQYLYYLSRTNTPSGTTTQSGLQFSQAGASDIRDQSRNWLPGPCYRQQRVSKTSADNNNSEYSWTGATKYHLNGRDSLVNPGPAMASHKDDEEKFFPQSGVLIFGKQGSEKTNVDIEKVMITDEEEIRTTNPVATEQYGSVSTNLQRGNRQAATADVNTQGVLPGMVWQDRDVYLQGPIWAKIPHTDGHFHPSPLMGGFGLKHPPPQILIKNTPVPANPSTTFSAAKFASFITQYSTGQVSVEIEWELQKENSKRWNPEIQYTSNYNKSVNVDFTVDTNGVYSEPRPIGTRYLTRNLLLAA

SEQ ID NO: 173 - protein, 725 aa, Adeno-associated virus 2
MAADGYLPDWLEDTLSEGIRQWWKLKPGPPPPKPAERHKDDSRGLVLPGYKYLGPFNGLDKGEPVNEADAAALEHDKAYDRQLDSGDNPYLKYNHADAEFQERLKEDTSFGGNLGRAVFQAKKRVLEPLGLVEEPVKTAPGKKRPVEHSPVEPDSSSGTGKAGQQPARKRLNFGQTGDADSVPDPQPLGQPPAAPSGLGTNTMATGSGAPMADNNEGADGVGNSSGNWHCDSTWMGDRVITTSTRTWALPTYNNHLYKQISSQSGASNDNHYFGYSTPWGYFDFNRFHCHFSPRDWQRLINNNWGFRPKRLNFKLFNIQVKEVTQNDGTTTIANNLTSTVQVFTDSEYQLPYVLGSAHQGCLPPFPADVFMVPQYGYLTLNNGSQAVGRSSFYCLEYFPSQMLRTGNNFTFSYTFEDVPFHSSYAHSQSLDRLMNPLIDQYLYYLSRTNTPSGTTTQSGLQFSQAGASDIRDQSRNWLPGPCYRQQRVSKTSADNNNSEYSWTGATKYHLNGRDSLVNPGPAMASHKDDEEKFFPQSGVLIFGKQGSEKTNVDIEKVMITDEEEIRTTNPVATEQYGSVSTNLQRGNRQAATADVNTQGVLPGMVWQDRDVYLQGPIWAKIPHTDGHFHPSPLMGGFGLKHPPPQILIKNTPVPANPSTTFSAAKFASFITQYSTGQVSVEIEWELQKENSKRWNPEIQYTSNYNKSVNVDFTVDTNGVYSEPRP

SEQ ID NO: 174 - protein, 707 aa, Adeno-associated virus 2
MAADGYLPDWLEDTLSEGIRQWWKLKPGPPPPKPAERHKDDSRGLVLPGYKYLGPFNGLDKGEPVNEADAAALEHDKAYDRQLDSGDNPYLKYNHADAEFQERLKEDTSFGGNLGRAVFQAKKRVLEPLGLVEEPVKTAPGKKRPVEHSPVEPDSSSGTGKAGQQPARKRLNFGQTGDADSVPDPQPLGQPPAAPSGLGTNTMATGSGAPMADNNEGADGVGNSSGNWHCDSTWMGDRVITTSTRTWALPTYNNHLYKQISSQSGASNDNHYFGYSTPWGYFDFNRFHCHFSPRDWQRLINNNWGFRPKRLNFKLFNIQVKEVTQNDGTTTIANNLTSTVQVFTDSEYQLPYVLGSAHQGCLPPFPADVFMVPQYGYLTLNNGSQAVGRSSFYCLEYFPSQMLRTGNNFTFSYTFEDVPFHSSYAHSQSLDRLMNPLIDQYLYYLSRTNTPSGTTTQSGLQFSQAGASDIRDQSRNWLPGPCYRQQRVSKTSADNNNSEYSWTGATKYHLNGRDSLVNPGPAMASHKDDEEKFFPQSGVLIFGKQGSEKTNVDIEKVMITDEEEIRTTNPVATEQYGSCIYQPPERQQTSSYRRCQHTRRSSRHGLAGQRCVPSGAHLGKDSTHGRTFSPLSPHGWIRTTPSSTDSHQEHPGTCESFDHLQCGKVCFLHHTVLHGTGQRGDRVRAAEGKQQTLESRNSVHFQLQQVC

SEQ ID NO: 175 - protein, 739 aa, Adeno-associated virus 2; identical to SEQ ID NO: 172

SEQ ID NO: 176 - protein, 737 aa, Adeno-associated virus 2
MASDGYLPDWLEDNLSEGIREWWDLKPGAPKPKANQQKQDDGRGLVLPGYKYLGPFNGLDKGEPVNAADAAALEHDKAYDQQLKAGDNPYLRYNHADAEFQERLQEDTSFGGNLGRAVFQAKKRVLEPFGLVEEGAKTAPGKKRPVEQSPQEPDSSSGIGKTGQQPAKKRLNFGQTGDSESVPDPQPLGEPPATPAAVGPTTMASGGGAPMADNNEGADGVGNASGNWHCDSTWLGDRVITTSTRTWALPTYNNHLYKQISSASTGASNDNHYFGYSTPWGYFDFNRFHCHFSPRDWQRLINNNWGFRPKRLNFKLFNIQVKEVTTNDGTTTIANNLTSTVQVFTDSEYQLPYVLGSAHQGCLPPFPADVFMVPQYGYLTLNNGSQAVGRSSFYCLEYFPSQMLRTGNNFTFSYTFEDVPFHSSYAHSQSLDRLMNPLIDQYLYYLSRTNTPSGTTTQSGLQFSQAGASDIRDQSRNWLPGPCYRQQRVSKTSADNNNSEYSWTGATKYHLNGRDSLVNPGPAMASHKDDEEKFFPQSGVLIFGKQGSEKTNVDIEKVMITDEEEIRTTNPVATEQYGSVSTNLQRGNRQAATADVNTQGVLPGMVWQDRDVYLQGPIWAKIPHTDGHFHPSPLMGGFGLKHHPPQILIKNTPVPANPSTTFSAAKFASFITQYSTGQVSVEIEWELQKENSKRWNPEIQYTSNYNKSVNVDFTVDTNGVYSEPRPIGTRYLTRNLL

SEQ ID NO: 177 - protein, 741 aa, Adeno-associated virus 2
MAADGYLPDWLEDTLSEGIREWWALKPGAPKPKANQQKQDDGRGLVLPGYKYLGPFNGLDKGEPVNEADAAALEHDKAYDQQLQAGDNPYLRYNHADAEFQERLQEDTSFGGNLGRAVFQAKKRVLEPLGLVEEPVKTAPGKKRPVEHSPVEPDSSSGTGKSGQQPARKRLNFGQTGDADSVPDPQPLGQPPAAPSGLGTNTMATGSGAPMADNNEGADGVGNSSGNWHCDSTWMGDRVITTSTRTWALPTYNNHLYKQISSQSGASNDNHYFGYSTPWGYFDFNRFHCHFSPRDWQRLINNNWGFRPKRLNFKLFNIQVKEVTQNDGTTTIANNLTSTVQVFTDSEYQLPYVLGSAHQGCLPPFPADVFMVPQYGYLTLNNGSQAVGRSSFYCLEYFPSQMLRTGNNFTFSYTFEDVPFHSSYAHSQSLDRLMNPLIDQYLYYLSRTNTPSGTTTQSGLQFSQAGASDIRDQSRNWLPGPCYRQQRVSKTSADNNNSEYSWTGATKYHLNGRDSLVNPGPAMASHKDDEEKFFPQSGVLIFGKQGSEKTNVDIEKVMITDEEEIRTTNPVATEQYGSVSTNLQRGNLANHNNTTNARQAATADVNTQGVLPGMVWQDRDVYLQGPIWAKIPHTDGHFHPSPLMGGFGLKHPPPQILIKNTPVPANPSTTFSAAKFASFITQYSTGQVSVEIEWELQKENSKRWNPEIQYTSNYNKSINVDFTVDTNGVYSEPRPIGTRYL

SEQ ID NO: 178 - protein, 730 aa, Adeno-associated virus 2
MASDGYLPDWLEDNLSEGIREWWDLKPGAPKPKANQQKQDDGRGLVLPGYKYLGPFNGLDKGEPVNAADAAALEHDKAYDQQLKAGDNPYLRYNHADAEFQERLQEDTSFGGNLGRAVFQAKKRVLEPFGLVEEGAKTAPGKKRPVEQSPQEPDSSSGIGKTGQQPAKKRLNFGQTGDSESVPDPQPLGEPPATPAAVGPTTMASGGGAPMADNNEGADGVGNASGNWHCDSTWLGDRVITTSTRTWALPTYNNHLYKQISSASTGASNDNHYFGYSTPWGYFDFNRFHCHFSPRDWQRLINNNWGFRPKRLNFKLFNIQVKEVTTNDGVTTIANNLTSTVQVFSDSEYQLPYVLGSAHQGCLPPFPADVFMIPQYGYLTLNNGSQAVGRSSFYCLEYFPSQMLRTGNNFTFSYTFEDVPFHSSYAHSQSLDRLMNPLIDQYLYYLNRTQNQSGSAQNNDLLFSRGSPAGMSVQPKNWLPGPCYRQQRVSKTKTDNNNSNFTWTGASKYNLNGRESIINPGTAMASHKDDKDKFFPMSGVMIFGKESAGASNTALDNVMITDEEEIKATNPVATERFGTVAVNLQSSSTDPATGDVHVMGALPGMVWQDRDVYLQGPIWAKIPHTDGHFHPSPLMGGFGLKNPPPQILIKNTPVPANPPAEFSATKFASFITQYSTGQVSVEIEWELQKENSKRWNPEVQYTSNYAKSANVDFTVDNNGLYTEPRPIGTR

SEQ ID NO: 179 - protein, 735 aa, Adeno-associated virus 2
  MOD_RES (239)..(239): Any amino acid
MASDGYLPDWLEDNLSEGIREWWDLKPGAPKPKANQQKQDDGRGLVLPGYKYLGPFNGLDKGEPVNAADAAALEHDKAYDQQLKAGDNPYLRYNHADAEFQERLQEDTSFGGNLGRAVFQAKKRVLEPFGLVEEGAKTAPGKKRPVEQSPQEPDSSSGIGKTGQQPAKKRLNFGQTGDSESVPDPQPLGEPPATPAAVGPTTMASGGGAPMADNNEGADGVGNASGNWHCDSTWLGDRXITTSTRTWALPTYNNHLYKQISSASTGASNDNHYFGYSTPWGYFDFNRFHCHFSPRDWQRLINNNWGFRPKRLNFKLFNIQVKEVTTNDGVTTIANNLTSTVQVFSDSEYQLPYVLGSAHQGCLPPFPADVFMIPQYGYLTLNNGSQAVGRSSFYCLEYFPSQMLRTGNNFTFSYTFEDVPFHSSYAHSQSLDRLMNPLIDQYLYYLNRTQNQSGSAQNNDLLFSRGSPAGMSVQPKNWLPGPCYRQQRVSKTKTDNNNSNFTWTGASKYNLNGRESIINPGTAMASHKDDKDKFFPMSGVMIFGKESAGASNTALDNVMITDEEEIKATNPVATERFGTVAVNLQSSSTDPATGDVHVMGALPGMVWQDRDVYLQGPIWAKIPHTDGHFHPSPLMGGFGLKNPPPQILIKNTPVPANPPAEFSATKFASFITQYSTGQVSVEIEWELQKENSKRWNPEVQYTSNYAKSANVDFTVDNNGLYTEPRPIGTRYLTRP

SEQ ID NO: 180 - protein, 733 aa, Adeno-associated virus 2
MASDGYLPDWLEDNLSEGIREWWDLKPGAPKPKANQQKQDDGRGLVLPGYKYLGPFNGLDKGEPVNAADAAALEHDKAYDQQLKAGDNPYLRYNHADAEFQERLQEDTSFGGNLGRAVFLAKKRVLEPFGLVEEGAKTAPGKKRPVEQSPQEPDSSSGIGKTGQQPAKKRLNFGQTGDSESVPDPQPLGEPPATPAAVGPTTMASGGGAPMADNNEGADGVGNASGNWHCDSTWLGDRVITTSTRTWALPTYNNHLYKQISSASTGASNDNHYFGYSTPWGYFDFNRFHCHFSPRDWQRLINNNWGFRPKRLNFKLFNIQVKEVTTNDGVTTIANNLTSTVQVFSDSEYQLPYVLGSAHQGCLPPFPADVFMIPQYGYLTLNNGSQAVGRSSFYCLEYFPSQMLRTGNNFTFSYTFEDVPFHSSYAHSQSLDRLMNPLIDQYLYYLNRTQNQSGSAQNNDLLFSRGSPAGMSVQPKNWLPGPCYRQQRVSKTKTDNNNSNFTWTGASKYNLNGRESIINPGTAMASHKDDKDKFFPMSGVMIFGKESAGASNTALDNVMITDEEEIKATNPVATERFGTVAVNLQSSSTDPATGDVHVMGALPGMVWQDRDVYLQGPIWAKIPHTDGHFHPSPLMGGFGLKNPPPQILIKNTPVPANPPAEFSATKFASFITQYSTGQVSVEIEWELQKENSKRWNPEVQYTSNYAKSANVDFTVDNNGLYTEPRPIGTRYLT

SEQ ID NO: 181 - protein, 734 aa, Adeno-associated virus 2
MAADGYLPDWLEDTLSEGIRQWWKLKPGPPPPKPAERHKDDSRGLVLPGCKYLGPFNGLDKGEPVNEADAAALEHDKAYDRQLDSGDNPYLKYNHADAEFQERLKEDTSFGGNLGRAVFQAKKRVLEPLGLVEEPVKTAPGKKRPVEHSPVEPDSSSGTGKAGQQPARKRLNFGQTGDADSVPDPQPLGQPPAAPSGLGTNTMATGSGAPMADNNEGADGVGNSSGNWHCDSTWMGDRVITTSTRTWALPTYNNHLYKQISSQSGASNDNHYFGYSTPWGYFDFNRFHCHFSPRDWQRLINNNWGFRPKRLNFKLFNIQVKEVTQNDGTTTIANNLTSTVQVFSDSEYQLPYVLGSAHQGCLPPFPADVFMIPQYGYLTLNNGSQAVGRSSFYCLEYFPSQMLRTGNNFTFNYTFEDVPFHSSYAHSQSLDRLMNPLIDQYLYYLNRTQNQSGSAQNNDLLFSRGSPAGMSVQPKNWLPGPCYRQQRVSKTKTDNNNSNFTWTGASKYNLNGRESIINPGTAMASHKDDKDKFFPMSGVMIFGKESAGASNTALDNVMITDEEEIKATNPVATERFGTVAVNLQSSSTDPATGDVHVMGALPGMVWQDRDVYLQGPIWAKIPHTDGHFHPSPLMGGFGLKNPPPQILIKNTPVPANPPAEFSATKFASFITQYSTGQVSVEIEWELQKENSKRWNPEVQYTSNYAKSANVDFTVDNNGLYTEPRPIGTRYLTRP

SEQ ID NO: 182 - protein, 734 aa, Adeno-associated virus 2
MAADGYLPDWLEDTLSEGIRQWWKLKPGPPPPKPAERHKDDSRGLVLPGYKYLGPFNGLDKGEPVNEADAAALEHDKAYDRQLDSGDNPYLKYNHADAEFQERLKEDTSFGGNLGRAVFQAKKRVLEPLGLVEEPVKTAPGKKRPVEHSPVEPDSSSGTGKAGQQPARKRLNFGQTGDADSVPDPQPLGQPPAAPSGLGTNTMATGSGAPMADNNEGADGVGNSSGNWHCDSTWMGDRVITTSTRTWALSTYNNHLYKQISSQSGASNDNHYFGYSTPWGYFDFNRFHCHFSPRDWQRLINNNWGFRPKRLNFKLFNIQVKEVTQNDGTTTIANNLTSTVQVFTDSEYQLPYVLGSAHQGCLPPFPADVFMVPQYGYLTLNNGSQAVGRSSFYCLEYFPSQMLRTGNNFTFSYTFEDVPFHSSYAHSQSLDRLMNPLIDQYLYYLSRTNTPSGTTTQSRLQFSQAGASDIRDQSRNWLPGPCYRQQRVSKTSADNNNSEYSWTGATKYHLNGRDSLVNPGPAMASHKDDEEKFFPQSGVLIFGKQGSEKTNVDIEKVMITDEEEIRTTNPVATEQYGSVSTNLQRGNRQAATADVNTQGVLPGMVWQDRDVYLQGPIWAKIPHTDGHFHPSPLMGGFGLKHPPPQILIKNTPVPANPSTTFSAAKFASFITQYSTGQVSVEIEWELQKENSKRWNPEIQYTSNYNKSINVDFTVDTNGVYSEPRPIGTRYLTRN

SEQ ID NO: 183 - protein, 738 aa, Adeno-associated virus 2
MAADGYLPDWLEDTLSEGIRQWWKLKPGPPPPKPAERHKDDSRGLVLPGYKYLGPFNGLDKGEPVNEADAAALEHDKAYDRQLDGGDNPYLKYNHADAEFQERLKEDTSFGGNLGRAVFQAKKRVLEPLGLVEEPVKTAPGKKRPVEHSPVEPDSSSGTGKAGQQPARKRLNFGQTGDADSVPDPQPLGQPPAAPSGLGTNTMATGSGAPMADNNEGADGVGNSSGNWHCDSTWMGDRVITTSTRTWALPTYNNHLYKQISSQSGASNDNHYFGYSTPWGYFDFNRFHCHFSPRDWQRLINNNWGFRPKRLNFKLFNIQVKEVTQNDGTTTIANNLTSTVQVFTDSEYQLPYVLGSAHQGCLPPFPADVFMVPQYGYLTLNNGSQAVGRSSFYCLEYFPSQMLRTGNNFTFSYTFEDVPFHSSYAHSQSLDRLMNPLIDQYLYYLSRTNTPSGTTTQSGLQFSQAGASDIRDQSRNWLPGPCYRQQRVSKTSADNNNSEYSWTGATKYHLNGRDSLVNPGPAMASHKDDEEKFFPQSGVLIFGKQGSEKTNVDIEKVMITDEEEIRTTNPVATEQYGSVSTNLQRGNRQAATADVNTQGVLPGMVWQDRDVYLQGPIWAKIPHTDGHFHPSPLMGGFGLKHPPPQILIKNTPVPANPSTTFSAAKFASFITQYSTGQVSVEIEWELQKENSKRWNPEIQYTSNYNKSVNVDFTVDTNGVYSEPRPIGTRYLTRNLLRP

SEQ ID NO: 184 - DNA, 2208 bp, Artificial Sequence
  Synthetic polynucleotide
atggctgccgatggttatcttccagattggctcgaggacactctctctgaaggaataagacagtggtggaagctcaaacctggcccaccaccaccaaagcccgcagagcggcataaggacgacagcaggggtcttgtgcttcctgggtacaagtacctcggacccttcaacggactcgacaagggggagccggtcaacgaggcagacgccgcggccctcgagcacgacaaggcctacgaccggcagctcgacagcggagacaacccgtacctcaagtacaaccacgccgacgcagagtttcaggagcgccttaaagaagatacgtcttttgggggcaacctcggacgagcagtcttccaggcgaaaaagagggttcttgaacctctgggcctggttgaggaacctgttaagacggctccgggaaaaaagaggccggtagagcactctcctgtggagccagactcctcctcgggaaccggaaaagcgggccagcagcctgcaagaaaaagattaaattttggtcagactggagacgcagactccgtacctgacccccagcctctcggacagccaccagcagccccctctggtctgggatctactacaatggctacaggcagtggcgcaccaatggcagacaataacgagggtgccgatggagtgggtaattcctcaggaaattggcattgcgattcccaatggctgggcgacagagtcatcaccaccagcacccgaacctgggccctgcccacatacaacaaccacctctacaagcaaatctccagccaatcaggagccagcaacgacaaccactactttggctacagcaccccctgggggtattttgacttcaacagattccactgccacttttcaccacgtgactggcaaagactcatcaacaacaactggggattccggcccaaaagactcaacttcaagctctttaatattcaagtcaaagaggtcacgcagaatggcggtacgacgacgattgccaataaccttaccagcacggttcaggtgtttactgactcggagtaccagctcccgtacgtcctgggctcggcgcatcaaggatgcctcccgccgtttccagcggacgtcttcatggtcccacagtatggatacctcaccctgaacaacgggagtcaggcggtaggacgctcttccttttactgcctggagtactttccttctcagatgctgcgtactggaaacaactttcagttcagctacacttttgaagacgtgcctttccacagcagctacgctcacagccagagtctggatcggctgatgaatcctctgatcgaccagtacctgtattatctgaacaagacacaaacaaatagtggaactcttcagcagtctcggctactgtttagccaagctggaccaaccaacatgtctcttcaagctaaaaactggctgcctggaccttgctacagacagcagcgtctgtcaaaacaggcaaacggcaacaacaacagcaactttccctggactgcagctacaaagtatcatctaaatggccgggactcgttggttaatccaggaccagctatggccagtcacaaggatgacgaagaaaagtttttccccatgcatggaaccctgatatttggtaaacaaggaacaaatgccaacgacgcggatttggaaaatgtcatgattacagatgaagaagaaatcagggccaccaatcccgtggctacggagcagtacgggactgtgtcaaataatttgcaaaactcaaacactggtccaactactggaactgtcaatcaccaaggagcgttacctggtatggtgtggcaggatcgagacgtgtacctgcagggacccatttgggccaagattcctcacaccgatggacactttcatccttctccactgacgggaggttttggactcaaacacccgcctcctcagatcatgatcaaaaacactcccgttccagccaatcctcccacaaacttcagttctgccaagtttgcttctttcatcacacagtattccacgggacaggtcagcgtggagatcgagtgggagctgcagaaggagaacagcaaacgctggaatcccgaaattcagtacacttccaactacaacaagtctgttaatgtggactttactgtggacactaatggtgtgtattcagagcctcgccccattggcaccagatacctgactcgtaatctgtaa

SEQ ID NO: 185 - protein, 735 aa, Artificial Sequence
  Synthetic polypeptide
MAADGYLPDWLEDTLSEGIRQWWKLKPGPPPPKPAERHKDDSRGLVLPGYKYLGPFNGLDKGEPVNEADAAALEHDKAYDRQLDSGDNPYLKYNHADAEFQERLKEDTSFGGNLGRAVFQAKKRVLEPLGLVEEPVKTAPGKKRPVEHSPVEPDSSSGTGKAGQQPARKRLNFGQTGDADSVPDPQPLGQPPAAPSGLGSTTMATGSGAPMADNNEGADGVGNSSGNWHCDSQWLGDRVITTSTRTWALPTYNNHLYKQISSQSGASNDNHYFGYSTPWGYFDFNRFHCHFSPRDWQRLINNNWGFRPKRLNFKLFNIQVKEVTQNGGTTTIANNLTSTVQVFTDSEYQLPYVLGSAHQGCLPPFPADVFMVPQYGYLTLNNGSQAVGRSSFYCLEYFPSQMLRTGNNFQFSYTFEDVPFHSSYAHSQSLDRLMNPLIDQYLYYLNKTQTNSGTLQQSRLLFSQAGPTNMSLQAKNWLPGPCYRQQRLSKQANGNNNSNFPWTAATKYHLNGRDSLVNPGPAMASHKDDEEKFFPMHGTLIFGKQGTNANDADLENVMITDEEEIRATNPVATEQYGTVSNNLQNSNTGPTTGTVNHQGALPGMVWQDRDVYLQGPIWAKIPHTDGHFHPSPLTGGFGLKHPPPQIMIKNTPVPANPPTNFSSAKFASFITQYSTGQVSVEIEWELQKENSKRWNPEIQYTSNYNKSVNVDFTVDTNGVYSEPRPIGTRYLTRNL

SEQ ID NO: 186 - DNA, 2208 bp, Artificial Sequence
  Synthetic polynucleotide
atggctgccgatggttatcttccagattggctcgaggacactctctctgaaggaataagacagtggtggaagctcaaacctggcccaccaccaccaaagctcgcagagcggcatcaggacgacagcaggggtcttgtgcttcctgggtacaagtacctcggacccttcaacggactcgacaaaggagagccggtcaacgaggcagacgccgcggccctcgagcacgacaaggcctacgaccggcagctcgacagcggagacaacccgtacctcaagtacaaccacgccgacgcggagtttcaggagcgtcttaaagaagatacgtcttttgggggcaacctcggacgagcagtcttccaggcgaaaaagagggttcttgaacctctgggcctggttgaggaacctgttaagacggctccgggaaaaaagaggccggtagagcactctcctgtggagccagactcctcctcgggaaccggaaaggcgggccatcagcctgcgagaaagagattgaattttggtcagactggagacgcagactccgtacctgacccccagcctctcggacagccaccagcagcccccacaagtctgggatctactacaatggctacaggcagtggcgcaccaatggcagacaataacgagggtgccgatggagtgggtaattcctcaggaaattggcattgcgattcccaatggctgggcgacagagtcatcaccaccagcacccgaacctgggccctgcccacctacaacaaccacctctacaagcaaatctccagccaatcaggagcctcgaacgacaaccactactttggctacagcaccccctgggggtattttgacttcaacagattccactgtcacttctccccacgtgattggcaaagactcatcaacaacaactggggattccgacccaagagactcaacttcaagctctttaacattcaagtcaaagaggtcacgcagaatgacggtacgacgacgattgccaataaccttaccagcacggttcaggtgtttactgactcggagtaccagctcccgtacgtcctcggctcggcgcatcaaggatgcctcccgccgtttccagcggacgtcttcacggtcccacagtatggatacctcaccctgaacaacgggagtcaggcggtaggacgctcttccttttactgcctggagtactttccttctcagatgctgcgtactggaaacaaccttaccttcagctacacctttgaggacgttcctttccacagcagctacgctcacagccagagtttggaccggctgatgaatcctctgatcgaccagtatctatattatctgaacaggacacaatcaaatagtggaactcttcagcagtctaggctactgtttagccaagctggacccaccagcatgtctcttcaagctaaaaactggctgcctggaccttgctacagacagcagcgtctttcaaagcaggcaaacgacaacaacaacagcaactttccctggactgcggctacaaagtatcatctaaatggccgggactcgttggttaatccaggaccagctatggccagccacaaagacgatgaagaaaagtttttccccatgcatggaaccctgatatttggtaaacaaggaacaaatgctaacgacgcggatttggagcatgttatgattacagatgaagaagaaatcaggaccaccaatcctgtggctacagagcagtacggaaacgtgtcaaataatttgcaaaactcaaatactggtccaactacagaaaatgtcaatcaccagggagcgttacctggtatggtgtggcaggatcgagacgtgtacctgcagggacccatttgggccaagattcctcacaccgacggacactttcacccttctccactgatgggaggttttggactcaaacacccgcctcctcaaatcatgatcaaaaacactcccgttccagccaatcctcccacaaactacagttctgccaagtttgcttctttcatcacacagtattccacgggccaggtcagcgtggagattgagtgggagctgcggaaggagaacagcaaacgctggaaccccgagatccagtatacttccaactacaacaaatctgttaatgtggactttactgtggacactaatggtgtgtattcagagcctcgccccattggcaccagatacctgactcgtaatctgtaa

SEQ ID NO: 187 - protein, 735 aa, Artificial Sequence
  Synthetic polypeptide
MAADGYLPDWLEDTLSEGIRQWWKLKPGPPPPKLAERHQDDSRGLVLPGYKYLGPFNGLDKGEPVNEADAAALEHDKAYDRQLDSGDNPYLKYNHADAEFQERLKEDTSFGGNLGRAVFQAKKRVLEPLGLVEEPVKTAPGKKRPVEHSPVEPDSSSGTGKAGHQPARKRLNFGQTGDADSVPDPQPLGQPPAAPTSLGSTTMATGSGAPMADNNEGADGVGNSSGNWHCDSQWLGDRVITTSTRTWALPTYNNHLYKQISSQSGASNDNHYFGYSTPWGYFDFNRFHCHFSPRDWQRLINNNWGFRPKRLNFKLFNIQVKEVTQNDGTTTIANNLTSTVQVFTDSEYQLPYVLGSAHQGCLPPFPADVFTVPQYGYLTLNNGSQAVGRSSFYCLEYFPSQMLRTGNNLTFSYTFEDVPFHSSYAHSQSLDRLMNPLIDQYLYYLNRTQSNSGTLQQSRLLFSQAGPTSMSLQAKNWLPGPCYRQQRLSKQANDNNNSNFPWTAATKYHLNGRDSLVNPGPAMASHKDDEEKFFPMHGTLIFGKQGTNANDADLEHVMITDEEEIRTTNPVATEQYGNVSNNLQNSNTGPTTENVNHQGALPGMVWQDRDVYLQGPIWAKIPHTDGHFHPSPLMGGFGLKHPPPQIMIKNTPVPANPPTNYSSAKFASFITQYSTGQVSVEIEWELRKENSKRWNPEIQYTSNYNKSVNVDFTVDTNGVYSEPRPIGTRYLTRNL

SEQ ID NO: 188 - DNA, 2208 bp, Artificial Sequence
  Synthetic polynucleotide
atggctgccgatggttatcttccagattggctcgaggacactctctctgaaggaataagacagtggtggaagctcaaacctggcccaccaccaccaaagcccgcagagcggcatcaggacgacagcaggggtcttgtgcttcctgggtacaagtacctcggacccttcaacggactcgacaaaggagagccggtcaacgaggcagacgccgcggccctcgagcacgacaaggcctacgaccggcagctcgacagcggagacaacccgtacctcaagtacaaccacgccgacgcggagtttcaggagcgtcttaaagaagatacgtcttttgggggcaacctcggacgagcagtcttccaggcgaaaaagagggttcttgaacctctgggcctggttgaggaacctgttaagacggctccgggaaaaaagaggccggtagagcactctcctgtggagccagactcctcctcgggaaccggaaaagcgggccatcagcctgcgagaaagagattgaattttggtcagactggagacgcagactccgtacctgacccccagcctctcggacagccaccagcagcccccacaagtttgggatctactacaatggctacaggcagtggcgcaccaatggcagacaataacgagggtgccgatggagtgggtaattcctcaggaaattggcattgcgattcccaatggctgggcgacagagtcatcaccaccagcacccgaacctgggccctgcccacctacaacaaccacctctacaagcaaatctccagccaatcaggagcctcgaacgacaaccactactttggctacagcaccccctgggggtattttgacttcaacagattccactgtcacttctccccacgtgattggcaaagactcatcaacaacaactggggattccgacccaagagactcaacttcaagctctttaacattcaagtcaaggaggtcacgcagaatgacggtacgacgacgattgccaataaccttaccagcacggttcaggtgtttactgactcggagtaccagctcccgtacgtcctcggctcggcgcatcaaggatgcctcccgccgtttccagcggacgtcttcatggtcccacagtatggatacctcaccctgaacaacgggagtcaggcggtaggacgctcttccttttactgcctggagtactttccttctcagatgctgcgtactggaaacaactttaccttcagctacacctttgaggacgttcctttccacagcagctacgctcacagccagagtttggaccggctgatgaatcctctgatcgaccagtatctatattatctgaacaggacacaatcaaatagtggaactcttcagcagtctaggctactgtttagccaagctggacccaccagcatgtctcttcaagctaaaaactggctgcctggaccttgctacagacagcagcgtctttcaaagcaggcaaacgacaacaacaacagcaactttccctggactgcggctacaaagtatcgtctaaatggccgggactcgttggttaatccaggaccagctatggccagccacaaagacgatgaagaaaagtttttccccatgcatggaaccctgatatttggtaaacaaggaacaaatgctaacgacgcggatttggagcatgttatgattacagatgaagaagaaatcaggaccaccaatcctgtggctacagagcagtacggaaacgtgtcaaataatttgcaaaactcaaatactggtccaactacagaaaatgtcaatcaccagggagcgttacctggtatggtgtggcaggatcgagacgtgtacctgcagggacccatttgggccaagattcctcacaccgacggacactttcacccttctccactgatgggaggttttggactcaaacacccgcctcctcaaatcatgatcaaaaacactcccgttccagccaatcctcccacaaacttcagttctgccaagtttgcttctttcatcacacagtattccacgggccaggtcagcgtggagattgagtgggagctgcagaaggagaacagcaaacgctggaaccccgagatccagtatacttccaactacaacaaatctgttaatgtggactttactgtggacactaatggtgtgtattcagagcctcgccccattggcaccagatacctgactcgtaatctgtaa

SEQ ID NO: 189 - protein, 735 aa, Artificial Sequence
  Synthetic polypeptide
MAADGYLPDWLEDTLSEGIRQWWKLKPGPPPPKPAERHQDDSRGLVLPGYKYLGPFNGLDKGEPVNEADAAALEHDKAYDRQLDSGDNPYLKYNHADAEFQERLKEDTSFGGNLGRAVFQAKKRVLEPLGLVEEPVKTAPGKKRPVEHSPVEPDSSSGTGKAGHQPARKRLNFGQTGDADSVPDPQPLGQPPAAPTSLGSTTMATGSGAPMADNNEGADGVGNSSGNWHCDSQWLGDRVITTSTRTWALPTYNNHLYKQISSQSGASNDNHYFGYSTPWGYFDFNRFHCHFSPRDWQRLINNNWGFRPKRLNFKLFNIQVKEVTQNDGTTTIANNLTSTVQVFTDSEYQLPYVLGSAHQGCLPPFPADVFMVPQYGYLTLNNGSQAVGRSSFYCLEYFPSQMLRTGNNFTFSYTFEDVPFHSSYAHSQSLDRLMNPLIDQYLYYLNRTQSNSGTLQQSRLLFSQAGPTSMSLQAKNWLPGPCYRQQRLSKQANDNNNSNFPWTAATKYRLNGRDSLVNPGPAMASHKDDEEKFFPMHGTLIFGKQGTNANDADLEHVMITDEEEIRTTNPVATEQYGNVSNNLQNSNTGPTTENVNHQGALPGMVWQDRDVYLQGPIWAKIPHTDGHFHPSPLMGGFGLKHPPPQIMIKNTPVPANPPTNFSSAKFASFITQYSTGQVSVEIEWELQKENSKRWNPEIQYTSNYNKSVNVDFTVDTNGVYSEPRPIGTRYLTRNL

SEQ ID NO: 190 - DNA, 2208 bp, Artificial Sequence
  Synthetic polynucleotide
atggctgccgatggttatcttccagattggctcgaggacactctctctgaaggaataagacagtggtggaagctcaaacctggcccaccaccaccaaagcccgcagagcggcatcaggacgacagcaggggtcttgtgcttcctgggtacaagtacctcggacccttcaacggactcgacaaaggagagccggtcaacgaggcagacgccgcggccctcgagcacgacaaggcctacgaccggcagctcgacagcggagacaacccgtacctcaagtacaaccacgccgacgcggagtttcaggagcgtcttaaagaagatacgtcttttgggggcaacctcggacgagcagtcttccaggcgaaaaagagggttcttgaacctctgggcctggttgaggaacctgttaagacggctccgggaaaaaagaggccggtagagcactctcctgtggagccagactcctcctcgggaaccggaaaagcgggccatcagcctgcgagaaagagattgaattttggtcagactggagacgcagactccgtacctgacccccagcctctcggacagccaccagcagcccccacaagtttgggatctactacaatggctacaggcagtggcgcaccaatggcagacaataacgagggtgccgatggagtgggtaattcctcaggaaattggcattgcgattcccaatggctgggcgacagagtcatcaccaccagcacccgaacctgggccctgcccacctacaacaaccacctctacaagcaaatctccagccaatcaggagcctcgaacgacaaccactactttggctacagcaccccctgggggtattttgacttcaacagattccactgtcacttctccccacgtgattggcaaagactcatcaacaacaactggggattccgacccaagagactcaacttcaagctctttaacattcaagtcaaagaggtcacgcagaatgacggtacgacgacgattgccaataaccttaccagcacggttcaggtgtttactgactcggagtaccagctcccgtacgtcctcggctcggcgcatcaaggatgcctcccgccgtttccagcggacgtcttcatggtcccacagtatggatacctcaccctgaacaacgggagtcaggcggtaggacgcccttccttttactgcctggagtactttccttctcagatgctgcgtactggaaacaactttaccttcagctacacctttgaggacgttcctttccacagcagctacgctcacagccagagtttggaccggctgatgaatcctctgatcgaccagtatctatattatctgaacaggacacaatcaaatagtggaactcttcagcagtctaggctactgtttagccaagctggacccaccagcatgtctcttcaagctaaaaactggctgcctggaccttgctacagacagcagcgtctttcaaagcaggcaaacgacaacaacaacagcaactttccctggactgcggctacaaagtatcatctaaatggccgggactcgttggttaatccaggaccagctatggccagccacaaagacgatgaagaaaagtttttccccatgcatgggaccctgatatttggtaaacaaggaacaaatgctaacgacgcggatttggagcatgttatgattacagatgaagaagaaatcaggaccaccaatcctgtggctacagagcagtacggaaacgtgtcaaataatttgcaaaactcaaatactggtccaactacagaaaatgtcaatcaccagggagcgttacctggtatggtgtggcaggatcgagacgtgtacctgcagggacccatttgggccaagattcctcacaccgacggacactttcacccttctccactgatgggaggttttggactcaaacacccgcctcctcaaatcatgatcaaaaacactcccgttccagccaatcctcccacaaacttcagttctgccaagtttgcttctttcatcacacagtattccacgggccaggtcagcgtggagattgagtgggagctgcagaaggagaacagcaaacgctggaaccccgagatccagtatacttccaactacaacaaatctgttaatgtggactttactgtggacactaatggtgtgtattcagagcctcgccccattggcaccagatacctgactcgtaatctgtaa

SEQ ID NO: 191 - protein, 735 aa, Artificial Sequence
  Synthetic polypeptide
MAADGYLPDWLEDTLSEGIRQWWKLKPGPPPPKPAERHQDDSRGLVLPGYKYLGPFNGLDKGEPVNEADAAALEHDKAYDRQLDSGDNPYLKYNHADAEFQERLKEDTSFGGNLGRAVFQAKKRVLEPLGLVEEPVKTAPGKKRPVEHSPVEPDSSSGTGKAGHQPARKRLNFGQTGDADSVPDPQPLGQPPAAPTSLGSTTMATGSGAPMADNNEGADGVGNSSGNWHCDSQWLGDRVITTSTRTWALPTYNNHLYKQISSQSGASNDNHYFGYSTPWGYFDFNRFHCHFSPRDWQRLINNNWGFRPKRLNFKLFNIQVKEVTQNDGTTTIANNLTSTVQVFTDSEYQLPYVLGSAHQGCLPPFPADVFMVPQYGYLTLNNGSQAVGRPSFYCLEYFPSQMLRTGNNFTFSYTFEDVPFHSSYAHSQSLDRLMNPLIDQYLYYLNRTQSNSGTLQQSRLLFSQAGPTSMSLQAKNWLPGPCYRQQRLSKQANDNNNSNFPWTAATKYHLNGRDSLVNPGPAMASHKDDEEKFFPMHGTLIFGKQGTNANDADLEHVMITDEEEIRTTNPVATEQYGNVSNNLQNSNTGPTTENVNHQGALPGMVWQDRDVYLQGPIWAKIPHTDGHFHPSPLMGGFGLKHPPPQIMIKNTPVPANPPTNFSSAKFASFITQYSTGQVSVEIEWELQKENSKRWNPEIQYTSNYNKSVNVDFTVDTNGVYSEPRPIGTRYLTRNL

SEQ ID NO: 192 - DNA, 2208 bp, Artificial Sequence
  Synthetic polynucleotide
atggctgccgatggttatcttccagattggctcgaggacactctctctgaaggaataagacagtggtggaagctcaaacctggcccaccaccaccaaagcccgcagagcggcataaggacgacagcaggggtcttgtgcttcctgggtacaagtacctcggacccttcaacggactcgacaagggagagccggtcaacgaggcagacgccgcggccctcgagcacgacaaggcctacgaccggcagctcgacagcggagacaacccgtacctcaagtacaaccacgccgacgcggagtttcaggagcgccttaaagaagatacgtcttttgggggcaacctcggacgagcagtcttccaggcaaaaaagagggttcttgaacctctgggcctggttgaggagcctgttaaaacggctccgggaaaaaagaggccggtagagcactctcctgcggagccagactcctcctcgggaaccggaaaagcgggccagcagcctgcaagaaaaagattgaatttcggtcagactggagacgcagactccgtacctgacccccagcctctcggacagccaccagcagccccctctggtctgggaactaatacgatggcttcaggcagtggcgcaccaatggcagacaataacgagggcgccgacggagtgggtaattcctcgggaaattggcattgcgattccacatggatgggcgacagagtcatcaccaccagcacccgaacttgggccctgcccacctacaacaaccatctctacaagcaaatctccagccaatcaggagccagcaacgacaaccactactttggctacagcaccccttgggggtattttgacttcaacagattccactgccacttttcaccacgtgactggcaaagactcatcaacaacaactggggattccggcccaagagactcaacttcaagctctttaacattcaagtcaaagaggtcacgcagaatgacggtacgacgacgattgccaataaccttaccagcacggttcaggtgtttactgactcggagtaccagctcccgtacgtcctcggctcggcgcatcaaggatgcctcccgccgttcccagcagacgtcttcatggtgccacagtatggatacctcaccctgaacaacgggagtcaggcagtaggacgctcttcattttactgcctggagtactttccttctcagatgctgcgtaccggaaacaactttaccttcagctacacctttgaggacgttcctttccacagcagctacgctcacagccagagtttggaccgtctcatgaatcctctcatcgaccagtacctgtattacttgagcagaacaaacactccaagcggaaccaccacgcagtccaggcttcagttttctcaggccggagcaagtgacattcgggaccagtctaggaactggcttcctggaccctgttaccgccagcagcgagtatcaaagacatctgcggataacaacaacagtgaatactcgtggactggagctaccaagtaccacctcaatggcagagactctctggtgaatccgggcccggccatggccagccacaaggacgatgaagaaaagttttttcctcagagcggggttctcatctttgggaagcaaggctcagagaaaacaaatgtggacattgaaaaggtcatgattacagacgaagaggaaatcaggaccaccaatcccgtggctacggagcagtatggttctgtatctaccaacctgcagggcggcaacacacaagcagctaccgcagatgtcaacacacaaggcgttcttccaggcatggtctggcaggacagagacgtgtacctgcaggggcccatctgggcaaagattccacacacggacggacattttcacccctctcccctcatgggcggattcggacttaaacaccctcctccacagattctcatcaagaacaccccggtacctgcgaatccttcgaccaccttcagtgcggcaaagtttgcttctttcatcacacagtattccacggggcaggtcagcgtggagatcgagtgggagctgcagaaggagaacagcaaacgctggaatcccgagatccagtacacttccaactacaacaaatctgttaatgtggactttactgttgacactaatggcgtgtattcagagcctcgccccattggcaccagatacctgactcgtaatctgtaa

SEQ ID NO: 193 - protein, 735 aa, Artificial Sequence
  Synthetic polypeptide
MAADGYLPDWLEDTLSEGIRQWWKLKPGPPPPKPAERHKDDSRGLVLPGYKYLGPFNGLDKGEPVNEADAAALEHDKAYDRQLDSGDNPYLKYNHADAEFQERLKEDTSFGGNLGRAVFQAKKRVLEPLGLVEEPVKTAPGKKRPVEHSPAEPDSSSGTGKAGQQPARKRLNFGQTGDADSVPDPQPLGQPPAAPSGLGTNTMASGSGAPMADNNEGADGVGNSSGNWHCDSTWMGDRVITTSTRTWALPTYNNHLYKQISSQSGASNDNHYFGYSTPWGYFDFNRFHCHFSPRDWQRLINNNWGFRPKRLNFKLFNIQVKEVTQNDGTTTIANNLTSTVQVFTDSEYQLPYVLGSAHQGCLPPFPADVFMVPQYGYLTLNNGSQAVGRSSFYCLEYFPSQMLRTGNNFTFSYTFEDVPFHSSYAHSQSLDRLMNPLIDQYLYYLSRTNTPSGTTTQSRLQFSQAGASDIRDQSRNWLPGPCYRQQRVSKTSADNNNSEYSWTGATKYHLNGRDSLVNPGPAMASHKDDEEKFFPQSGVLIFGKQGSEKTNVDIEKVMITDEEEIRTTNPVATEQYGSVSTNLQGGNTQAATADVNTQGVLPGMVWQDRDVYLQGPIWAKIPHTDGHFHPSPLMGGFGLKHPPPQILIKNTPVPANPSTTFSAAKFASFITQYSTGQVSVEIEWELQKENSKRWNPEIQYTSNYNKSVNVDFTVDTNGVYSEPRPIGTRYLTRNL

SEQ ID NO: 194 - DNA, 3161 bp, Artificial Sequence
  Synthetic polynucleotide
gattgaatttagcggccgcgaattcgcccttgctgcgtcaactggaccaatgagaactttccattcaatgattgcgtcgacaagatggtgatctggtgggaggagggaaagatgaccgccaaggtcatggagtcggccaaagccattctcggaggaagcaaggtgcgcgtggaccagaaatgtaagtcctcggcccagatagacccgactcccgtgattgtcacctccaacaccaacatgtgcgccgtgattgacgggaactcaacgaccttcgagcaccagcagccgttgcaagaccggatgttcaaatttgaactcacccgccgtctggatcatgactttgggaaggtcaccaagcaggaagtcaaagactttttccggtgggcaaaggatcacgtggttgaggtggagcatgaattctacgtcaaaaagggtggagccaagaaaagacccgcccccagtgacgcagatataagtgagcccaaacgggcgcgcgggtcagttgcgcagccatcgacgtcagacgcggaagcttcgatcaactacgcggacaggtaccaaaacaaatgttctcgtcacgtgggcatgaatctgatgctgtttccctgcagacaatgcgagagaatgaatcaaaattcaaatatctgcttcactcacggacagaaggactgtttagagtgctttcccgtgtcagaatctcaacccgtttctgtcgtcaaaaaggcgtatcagaaactttgctacattcatcatatcatgggaaaggtgccagacgcttgcactgcctgcgatctggtcaatgtggatttggatgactgcatctctgaacaataaatgatttaaatcaggtatggctgccgatggttatcttccagattggctcaaggacactctctctgaaggaataagacagtggtggaagctcaaacctggcccaccaccaccaaagcccgcagagcggcataaggacgacagcgggggtcttgtgcttcctgggtacaagtacctcggacccttcaacggactcgacaagggagagccggtcaacgaggcagacgccgcggccctcgagtacgacaaggcctacgaccggcagctcgacagcggagacaacccgtacctcaagtacaaccacgccgacgcggagtttcaggagcgccttaaagaagatacgtcttttgggggcaacctcggacgagcagtcttccaggcgaaaaagagggttcttgaacctctgggcctggttgaggaacctgttaagacggctccgggaaaaaagaggccggtagagcactctcctgtggagccagactcctcctcgggaacaggaaaagcgggccagcagcctgcgagaaagagattgaattttggtcagactggagacgcagactccgtacctgacccccagcctctcggacagccaccagcagccccctctggtctgggaactaatacgatggctacaggcagtggcgcaccaatggcagacaataacgagggcgccgacggagtgggtaattcctcgggaagttggcattgcgattccacatggatgggcgacagagtcatcaccaccagcacccgaacctgggctctgcccacctacaacaaccatctgtacaagcagatctccagccaatcaggagccagcaacgacaaccactactttggctacagcaccccttgggggtattttgacttcaacagattccactgccacttttcaccacgtgactggcaaagactcatcaacaacaactggggattccggcccaagagactcaacttcaagctctttaacattcaagtcaaggaggtcacgcagaatgacggtacgacgacgattgccaataaccttaccagcacggttcaggtgtttactgactcggagtaccagctcccgtacgtccccggctcggcgcatcaaggatgcctcccgccgttcccagcagacgtcttcatggtgccacagtatggatacctcaccctgaacaacgggagtcaggcagtaggacgctcttcattttactgcctggagtactttccttctcagatgcttcgtaccggaaacaactttaccttcagctacacctttgaggatgttcctttccacagcagctacgctcacagccagagtttggaccgtctcatgaatcctctcatcgaccagtacctgtattacttgagcagaacaaacactccaagcggaaccaccacgcagtccaggcttcagttttctcaggccggagcaagtgacattcgggaccagtctaggaactggcttcctggaccctgttaccgccagcagcgagtatcaaagacagctgcggacaacaacaacagtgaatactcgtggactggagctaccaagtaccacctcaatggcagagactctctggtgaatccgggcccggccatggccagccacaaggacgatgaagaaaagttttttcctcaaagcggggttctcatctttgggaagcaaggctcagagaaaacaaatgtggacattgaaaaggtcatgattacagacgaagaggaaatcagaaccaccaatcccgtggccacggagcagtatggttctgtatctaccaacctccagagcggcaacacacaagcagctactgcagatgtcaacacacaaggcgttcttccaggcatggtctggcaggacagagacgtgcacctgcaggggcctatctgggcaaagattccacacacggacggacattttcacccctctcccctcatgggcggatttggacttaaacaccctcctccacagattctcatcaagaacaccccggtacctgcaaatccttcgaccaccttcagtgcggcaaagtttgcttccttcatcacacagtattccacagggcaggtcagcgtggagatcgagtgggagctgcagaaggagaacagcaaacgctggaaccccgagatccagtacacttccaactacaacaaatctgttaatgtggactttactgtggacactaatggtgtgtattcagagcctcgccccattggcaccagatacctgactcgtaatctgtaattgcttgttaatcaataaaccgtttaattcgtttcagttgaactttggtctctgcgaagggcgaattcgtttaaaccctgcaggactagtccctttagtgagg

SEQ ID NO: 195 - DNA, 3162 bp, Artificial Sequence
  Synthetic polynucleotide
gaattgaatttagcggccgcgaattcgcccttcgcagagaccaaagttcaactgaaacgaattaaacggtttattgattaacaagcaattacagattacgagtcaggtatctggtgccaatggggcgaggctctgaatacacgccattagtgtccacagtaaagtccacattaacagacttgttgtagttggaagtgtactgaatttcgggattccagcgtttgctgttttccttctgcagctcccactcgatctccacgctgacctgtcccgtggagtactgtgtgatgaaggaagcaaactttgccgcactgaaggtggtcgaaggattcgcaggtaccggggtgttcttgatgagaatctgtggaggagggtgtttaagtccgaatccacccatgaggggagaggggtgaaaatgtccgtccgtgtgtggaatctttgcccagatgggcccctgaaggtacacatctctgtcctgccagaccatgcctggaagaacgccttgtgtgttgacatctgcggtagctgcttgtctgttgcctctctggaggttggtagatacagaaccgtactgctccgtagccacgggattggttgtcctgatttcctcttcgtctgtaatcatgaccttttcaatgtccacatttgttttctctgagccttgcttcccaaagatgagaaccccgctctgaggaaaaaacttttcttcattgtccttgtggcttgccatggccgggcccggattcaccagagagtctctgccattgaggtggtacttggtagctccagtccacgagtattcactgttgttgttatccgcagatgtctttgatactcgctgctggcggtaacagggtccaggaagccagttcctagactggtcccgaatgtcactcgctccggcctgagaaaactgaagccttgactgcgtggtggttccacttggagtgtttgttgtgctcaagtaatacaggtactggtcgatgagaggattcatgagacggtccagactctggctgtgagcgtagccgctgtggaaaggaacgtcctcaaaagtgtagctgaaggtaaagttgtttccggtacgcagcatctgagaaggaaagtactccaggcagtaaaatgaagagcgtcctactgcctgactcccgttgttcagggtgaggtatccatactgtggcaccatgaagacgtctgctgggaacggcgggaggcatccttgatgcgccgagccgaggacgtacgggagctggtactccgagtcagtaaacacctgaaccgtgctggtaaggttattggcaatcgtcgtcgtaccgtcattctgcgtgacctctttgacttgaatgttaaagagcttgaagttgagtctcttgggtcggaatccccagttgttgttgatgagtctttgccagtcacgtggtgaaaagtggcagtggaatctgttgaagtcaaaatacccccaaggggtgctgtagccaaagtagtgattgtcgttcgaggctcctgattggctggaaatttgtttgtagaggtggttgttgtaggtgggcagggcccaggttcgggtgctggtggtgatgactctgtcgcccatccatgtggaatcgcaatgccaatttcccgaggaattacccactccgtcggcgccctcgttattgtctgccattggtgcgccactgcctgtagccatcgtattagttcccagaccagagggggctgctggtggctgtccgagaggctgggggtcaggtactgagtctgcgtctccagtctgaccaaaattcaatctttttcttgcaggctgctggcccgcctttccggttcccgaggaggagtctggctccacaggagagtgctctaccggcctcttttttcctggagccgtcttgacaggttccccaaccaggcccagaggttcaagaaccctctttttcgcctggaagactgctcgtccgaggttgcccccaaaagacgtatcttctttaaggcgctcctgaaactccgcgtcggcgtggttgtacttgaggtacgggttgtctccgctgtcgagctgccggtcgtaggctttgtcgtgctcgagggccgcggcgtctgcctcgttgaccggctctcccttgtcgagtccgttgaagggtccgaggtacttgtacccaggaagcacaagacccctgctgtcgtccttatgccgctctgcgggctttggtggtggtgggccaggtttgagcttccaccactgtcttattccttcagagagagtgtcctcgagccaatctggaagataaccatcggcagccatacctgatttaaatcatttattgttcaaagatgcagtcatccaaatccacattgaccagatcgcaggcagtgcaagcgtctggcacctttcccatgatatgatgaatgtagcacagtttctgatacgcctttttgacgacagaaacgggttgagattctgacacgggaaagcactctaaacagtctttctgtccgtgagtgaagcagatatttgaattctgattcattctctcgcattgtctgcagggaaacagcatcagattcatgcccacgtgacgagaacatttgttttggtacctgtctgcgtagttgatcgaagcttccgcgtctgacgtcgatggctgcgcaactgactcgcgcacccgtttgggctcacttatatctgcgtcactgggggcgggtcttttcttggctccaccctttttgacgtagaattcatgctccacctcaaccacgtgatcctttgcccaccggaaaaagtctttgacttcctgcttggtgaccttcccaaagtcatgatccagacggcgggtgagttcaaatttgaacatccggtcttgcaacggctgctggtgttcgaaggtcgttgagttcccgtcaatcacggcgcacatgttggtgttggaggtgacgatcacgggagtcgggtctatctgggccgaggacttgcatttctggtccacgcgcaccttgcttcctccgagaatggctttggccgactccacgaccttggcggtcatcttcccctcctcccaccagatcaccatcttgtcgacacagtcgttgaagggaaagttctcattggtccagttgacgcagcaagggcgaattcgtttaaacctgcaggactagtccctttagtgaggg

SEQ ID NO: 196 - DNA, 3164 bp, Artificial Sequence
  Synthetic polynucleotide
gcgaattgaatttagcggccgcgaattcgcccttcgcagagaccaaagttcaactgaaacgaattaaacggtttattgattaacaagcaattacaaattacgagtcaggtatctggtgccaatggggcgaggctctgaatacacgccattagtgtccacagtaaagtccacattaacagacttgttgtagttggaagtgtactgaatttcgggattccagcgtttgctgttttccttctgcagctcccactcgatctccacgctgacctgtcccgtggagtactgtgtgatgaaggaagcaaactttgccgcactgaaggtggtcgaaggattcgcaggtaccggggtgttcttgatgagaatctgtggaggagggtgtttaggtccgaatccacccatgaggggagaggggtgaaaatgtccgtccgtgtgtggaatctttgcccagatgggcccctgaaggtacacatctctgtcctgccagaccatgcctggaagaacgccttgtgtgttgacatctgcggtagctgcttgtctgttgcctctctggaggttggtagatacagaaccatactgctccgtagccacgggattggttgtcctgatttcctcttcgtctgtaatcatgaccttttcaatgtccacatttgttttctctgagccttgcttcccaaagatgagaaccccgctctgaggaaaaaacttttcttcattgtccttgtggcttgccatggccgggcccggattcaccagagagtctctgccattgaggtggtacttggtagctccagtccacgagtattcactgttgttgttatccgcagatgtctttgatactcgctgctggcggtaacagggtccaggaagccagttcctagactggtcccgaatgtcactcgctccggcctgagaaaactgaagccttgactgcgtggtggttccacttggagtgtttgttgtgctcaagtaatacaggtactggtcgatgagaggattcatgagacggtccagactctggctgtgagcgtagctgctgtggaaaggaacgtcctcaaaagtgtagctgaaggtaaagttgtttccggtacgcagcatctgagaaggaaagtactccgggcagtaaaatgaagagcgtcctactgcctgactcccgttgctcagggtgaggtatccatactgtggcaccatgaagacgtctgctgggaacggcgggaggcatccttgatgcgccgagccgaggacgtacgggagctggtactccgagtcagtaaacacctgaaccgtgctggtaaggttattggcaatcgtcgtcgtaccgtcattctgcgtgacctctttgacttgaatgttaaagagcttgaagttgagtctcttgggtcggaatccccagttgttgttgatgagtctttgccagtcacgtggtgaaaagtggcagtggaatctgttgaagtcaaaatacccccaaggggtgctgtagccaaagtagtgattgtcgttcgaggctcctgattggctggaaatttgtctgtagaggtggttgttgtaggtgggcagggcccaggttcgggtgctggtggtgatgactctgtcgcccatccatgtggaatcgcaatgccgatttcccgaggaattacccactccgtcggcgccctcgttattgtctgccattggtgcgccactgcctgtagccatcgtattagttcccagaccagagggggctgctggtggctgtccgagaggctgggggtcaggtactgagtctgcgtctccagtctgaccaaaattcaatctttttcttgcaggctgctggcccgcctttccggttcccgaggaggagtctggctccacaggagagtgctctaccggcctcttttttcccggagccgtcttaacaggttccccaaccaggcccagaggttcaagaaccctctttttcgcctggaagactgctcgtccgaggttgcccccaaaagacgtatcttctttaaggcgctcctgaaactccgcgtcggcgtggttgtacttgaggtacgggttgtctccgctgtcgagctgccggtcgtaggctttgtcgtgctcgagggccgcggcgtctgcctcgttgaccggctctcccttgtcgagtccgttgaagggtccgaggtacttgtacccaggaagcacaagacccctgctgtcgtccttatgccgctctgcgggctttggtggtggtgggccaggtttgagcttccaccactgtcttattccttcagagagagtgtcctcgagccaatctggaagataaccatcggcagccatacctgatttaaatcatttattgttcaaagatgcagtcatccaaatccacattgaccagatcgcaggcagtgcaagcgtctggcacctttcccatgatatgatgaatgtagcacagtttctgatacgcctttttgacgacagaaacgggttgagattctgacacgggaaagcactctaaacagtctttctgtccgtgagtgaagcagatatttgaattctgattcattctctcgcattgtctgcagggaaacagcatcagattcatgcccacgtgacgagaacatttgttttggtacctgtctgcgtagttgatcgaagcttccgcgtctgacgtcgatggctgcgcaactgactcgcgcacccgtttgggcccacttatatctgcgtcactgggggcgggtcttttcttggctccaccctttttgacgtagaattcatgctccacctcaaccacgtgatcctttgcccaccggaaaaagtctttgacttcctgcttggtgaccttcccaaagtcatgatccagacggcgggtgagttcaaatttgaacatccggtcttgcaacggctgctggtgttcgaaggtcgttgagttcccgtcaatcacggcgcacatgttggtgttggaggtgacgatcacgggagtcgggtctatctgggccgaggacttgcatttctggtccacgcgcaccttgcttcctccgagaatggctttggccgactccacgaccttggcggtcatcttcccctcctcccaccagatcaccatcttgtcgacacagtcgttgaagggaaagttctcattggtccagttgacgcagcaagggcgaattcgtttaaacctgcaggactagtccctttagtgaggg

SEQ ID NO: 197 - DNA, 3163 bp, Artificial Sequence
  Synthetic polynucleotide
accctcactaaagggactagtcctgcaggtttaaacgaattcgcccttgctgcgtcaactggagcaatgagaactttcccttcaacgactgtgtcgacaagatggtgatttggtgggaggaggggaagatgaccgccaaggtcgtggagtcggccaaagccattctcggaggaagcaaggtgcgcgtggaccagaaatgcaagtcctcggcccagatagatccgactcccgtgatcgtcacctccaacaccaacatgtgcgccgtgattgacgggaactcaacgaccttcgaacaccagcagccgttgcaagaccggatgttcaaatttgaactcacccgccgtctggatcatgactttgggaaggtcaccaagcaggaagtcaaagactttttccggtgggcaaaggatcacgtggttgaggtggagcatggattctacgtcaaaaagggtggagccaagaaaagacccgcccctagtgacgcagatataagtgagcccaaacgggtgcgcgagtcagttgcgcagccatcgacgtcggacgcggaagcttcgatcaactacgcggacaggtaccaaaacaaatgttctcgtcacgtgggcatgaatctgatgctgtttccctgcagacaatgcgagagaatgaatcaaaattcaaatatctgcttcactcacggacagaaagactgtttagagtgctttcccgtgtcagaatctcaacctgtttctgtcgtcaaaaaggcgtatcagaaactgcgctacattcatcatatcatgggaaaggtgccagacgcttgcactgcctgcgatctggtcaatgtggatttggatgactgcatctctgaacaataaatgatttaaatcaggtatggctgccgatggttatcttccagattggctcgaggacactctctctgaaggaataagacagtggtggaagctcaaacctggcccaccaccaccaaagcccgcagagcggcataaggacgacagcaggggtcttgtgcttcctgggtacaagtacctcggacccttcaacggactcgacaagggagagccggtcaacgaggcagacgccgcggccctcgagcacgacaaggcctacgaccggcagctcgacagcggagacaacccgtacctcaagtacaaccacgccgacgcggagtttcaggagcgtcttaaagaagatacgtcttttgggggcaacctcggacgagcagtcttccaggcgaaaaagagggttcttgaacctctgggcctggttgaggaacctgttaagacggctccgggaaaaaagaggccggtagagcactctcctgcggagccagactcctcctcgggaaccggaaaagcgggccagcagcctgcaagaaaaagactgaatttcggtcagactggagacgcagactccgtacctgacccccagcctctcggacagccaccagcagcccccacaagtttgggatctactacaatggctacaggcagtggcgcaccaatggcagacaataacgagggtgccgatggagtgggtaattcctcaggaaattggcattgcgattcccaatggctgggcgacagagtcatcaccaccagcacccgaacctgggccctgcccacctacaacaaccacctttacaagcaaatctccagccaatcaggagcctcaaacgacaaccactactttggctacagcaccccctgggggtattttgacttcaacagattccactgccacttttcaccacgtgactggcaaagactcatcaacaacaactggggattccgacccaagagactcaacttcaagctctttaacattcaagtcaaagaggtcacgcagaatgacggtacgacgacgattgccaataaccttaccagcacggttcaggtgtttactgactcggagtaccagctcccgtacgtcctcggctcggcgcatcaaggatgcctcccgccgtttccagcggacgtcttcatggtcccacagtatggatacctcaccctgaacaacgggagtcaggcggtaggacgctcttccttttactgcctggagtgctttccttctcagatgctgcgtactggaaacaactttcagttcagctacacttttgaagacgtgcctttccacagcagctacgctcacagccagagtttggatcggctgatgaatcctctgatcgaccagtacctgtattatctaaacagaacacaaacagctagtggaactcagcagtctcggctactgtttagccaagctggacccacaagcatgtctcttcaagctaaaaactggctgcctggaccgtgttatcgccagcagcgtttgtcaaagcaggcaaacgacaacaacaacagcaactttccctggactggagctaccaagtaccacctcaatggcagagactctttggtgaacccgggcccggccatggccagccacaaggacgatgaagaaaagtttttccccatgcatggaaccctaatatttggtaaagaaggaacaaatgctaccaacgcggaattggaaaatgtcatgattacagatgaagaggaaatcaggaccaccaatcccgtggctacagagcagtacggatatgtgtcaaataatttgcaaaactcaaatactgctgcaagtactgaaactgtgaatcaccaaggagcattacctggtatggtgtggcaggatcgagacgtgtacctgcagggacccatttgggccaagattcctcacaccgatggacactttcatccttctccactgatgggaggttttggactcaaacacccgcctcctcagattatgatcaaaaacactcccgttccagccaatcctcccacaaacttcagttctgccaagtttgcttccttcatcacacagtattccacgggacaggtcagcgtggagatcgagtgggagctgcagaaggagaacagcaaacgctggaatcccgaaattcagtacacttccaactacaacaaatctgttaatgtggactttactgtggacactaatggtgtgtattcagagcctcgccccattggcaccagatacctgactcgtaatctgtaattgcttgttaatcaataaaccgtttaattcgtttcagttgaactttggtctctgcgaagggcgaattcgcggccgctaaattcaattcgcc

SEQ ID NO: 198 - protein, 735 aa, Artificial Sequence
  Synthetic polypeptide
MAADGYLPDWLEDTLSEGIRQWWKLKPGPPPPKPAERHKDDSRGLVLPGYKYLGPFNGLYKGEPVDEADAAALEHDKAYDRQLDSGDNPYLKYNHADAEFQERLKEDTSFGGNLGRAVFQAKKRVLEPLGLVGEPVKTAPGKKRPVEHSPVEPDSSSGTGKAGNQPARKRLNFGQTGDADSVPDPQPLGQPPAAPSGLGSTTMATGSGAPVADNNEGADGVGNSSGNWHCDSQWLGDRVITTSTRTWALPTYNNHLYKQISSQSGASNDNHYFGYSTPWGYFDFNRFHCHFSPRDRQRLINNNWGFRPKRLNFKLFNIQVKEVTQNDGTTTIANNLTSTVQVFTDSGYQLPYVLGLAHQGCLPPFPADVFMVPQYGYLTLNNGSQAVGRSSFYCLEYFPSQMLRTGNNFQFSYTFEDVPFHSSYAHSQSLDRLMNPLIDQYLYYLNKTQSNSGTLQQSRLLFSQAGPTSMSLQAKNWLPGPCYRQQRLSKQANDNNNSNFPWTAATKYHLNGRDSLVNPGPAMASHKDDEEKFFPMHGTLIFGKQGTNANDADLDNVMITDEEEIRTTNPVATEQYGYVSNNLQNSNTGPTTGTVNHQGALPGMVWQDRDVYLQGPIWAKIPHTDGHFHPSPLMGGFGLKHPPPQIMIKNTPVPANPPTNFSSAKFASFITQYSTGQVSVEIEWELQKEDSKRWNPEIQYTSNYNKPVNVDFTVDTNGVYSEPRPIGTRYLTRNL

SEQ ID NO: 199 - DNA, 2208 bp, Artificial Sequence
  Synthetic polynucleotide
atggctgccgatggttatcttccagattggctcgaggacactctctctgaaggaataagacagtggtggaagctcaaacctggcccaccaccaccaaagcccgcagagcggcataaggacgacagcaggggtcttgtgcttcctgggtacaagtacctcggacccttcaacggactctacaagggagagccggtcgacgaggcagacgccgcggccctcgagcacgacaaggcctacgaccggcagctcgacagcggagacaacccgtacctcaagtacaaccacgccgacgcggagtttcaggagcgccttaaagaagatacgtcttttgggggcaacctcggacgagcagtcttccaggccaaaaagagggttcttgaacctctgggcttggttggggagcctgttaaaacggctccgggaaaaaagaggccggtagagcactctcctgtggagccagactcctcctcgggaaccggaaaagcgggcaaccagcctgcaagaaaaagattgaattttggtcagactggagacgcagactccgtacctgacccccagcctctcggacagccaccagcagccccctctggtctgggatctactacaatggctacaggcagtggcgcaccagtggcagacaataacgagggtgccgatggagtgggtaattcctcaggaaattggcattgcgattcccaatggctgggcgacagagtcatcaccaccagcacccgaacctgggctctgcccacctacaataaccacctctacaagcaaatctccagccaatcaggagcctcaaacgacaaccactactttggctacagcaccccctgggggtattttgacttcaacagattccactgccacttttcaccacgtgaccggcaaagactcatcaacaacaactggggattccgaccaaaaagactcaacttcaagctctttaacattcaagtcaaagaggtcacgcagaatgacggtacgacgacgattgccaataaccttaccagcacggttcaggtgtttactgactcggggtaccagctcccgtacgtcctcggcttggcgcatcaaggatgcctcccgccgttcccagcagacgtcttcatggtgccacagtatggatacctcaccctgaacaacgggagtcaggcggtaggacgctcttccttttactgcctggagtactttccttctcagatgctgcgtactggaaacaactttcagttcagctacacctttgaagacgttcctttccacagcagctacgctcacagccagagtctggatcggctgatgaatcctctgatcgaccagtacctgtattatctgaacaagacacaatcaaatagtggaactcttcagcagtctcggctactgtttagccaagctggacccaccagcatgtctcttcaagctaaaaactggctgcctggaccttgctacagacagcagcgtctgtcaaagcaggcaaacgacaacaacaacagcaactttccctggactgcggctacaaagtatcatctaaatggccgggactcgttggttaatccaggaccagctatggccagccacaaagacgatgaagaaaagtttttccccatgcatggaaccctgatatttggtaaacaaggaacaaatgctaacgacgcggatttggacaatgtcatgattacagatgaagaagaaatccgcaccaccaatcccgtggctacggagcagtacggatatgtgtcaaataatttgcaaaactcaaatactggtccaactactggaactgtcaatcaccaaggagcgttacctggtatggtgtggcaggatcgagacgtgtacctgcagggacccatttgggccaagattcctcacaccgatggacactttcatccttctccacttatgggaggttttggactcaaacacccacctcctcagatcatgattaaaaacactcccgttccagccaatcctcccacaaacttcagttctgccaagtttgcttctttcatcacacagtattccacgggacaagtcagcgtggagatcgagtgggagctgcagaaggaggacagcaaacgctggaaccccgagatccagtacacttccaactataacaaacctgttaatgtggactttactgtggacactaatggtgtgtattcagagcctcgccccattggcaccagatacctgactcgtaatctgtaa

SEQ ID NO: 200 - DNA, 3161 bp, Artificial Sequence
  Synthetic polynucleotide
cgaattgatttagcggccgcgaattcgcccttcgcagagaccaaagttcaactgaaacgaattaaacggtttattgattaacaagcaattacagattacgagtcaggtatctggtgccaatggggcgaggctctgaatacacaccattagtgtccacagtaaagtccacattaacagatttgttgtagttggaagtgtactggatctcgggattccagcgtttgctgttctccttctgtagctcccactcgatctccacgctgacccgccccgtggaatactgtgtgatgaaggaagcaaactttgccgcactgaaggtggtcgaaggattcgcaggtaccggggtgtttttgatgagaatctgtggaggagggtgtttaagtccgaatccgcccatgaggggagaggggtgaaaatgtccgtccgtgtgcggaatctttgcccagataggcccctgcaggtacacgtctctgtcctgccagaccatgcctggaagaacgccttgtgtgttgacatctgcagtagatgcttgtgtgttgccgctctggaggttggtagatacagaaccatactgctccgtggccacgggattggtggttctgatttcctcttcgtctgtaatcatgaccttttcaatgtccacatttgttttctctgatccttgttttccaaagatgagaaccccgctctgaggaaaaaacttttcttcatcgtccttgtggctggccattgccgggcccggattcaccagagagtctctgccattgaggtggtacttggtagctccaatccacgagtattcactgttgttgttgtccgcagatgtctttgatactcgctgctggcggtaacagggtccaggaagccagttcctagactgatcccgaatgtcactcgctccggcctgagaaaactgaagcctggactgcgtggtggttccgcttggagtgtttgttctgctcaagtaatacaggtactggtcgatgagaggattcatgagacggtccaaactctggctgtgagcgtagctgctgtggaaaggaacatcctcaaaggtgtagctgaaggtaaagttgtttccggtacgcagcatctgagaagggaagtactccaggcagtaaaatgaagagcgtcctactgcctgactcccgttgttcagggtgaggtatccatactgtggcaccatgaagacgtctgctgggaacggcgggaggcatccttgatgcgccgagccgaggacgtacgggagctggtactccgagtcagtaaacacctgaaccgtgctggtaaggttattggcaatcgtcgtcgtaccatcattctgcgtgacctctctgacttgaatgttaaagagcttgaagttgagtctcttgggccggaatccccagttgttgttgatgagtctttgccagtcacgtggtgaaaagtggcagtggaatctgttgaagtcaaaatacccccaaggggtgctgtagccaaagtagtggttgtcgttgctggctcctgattggctggaaatctgcttgtacagatggttgttgtaggtgggcagagcccaggttcgggtgctggtggtgatgactctgtcgcccatccatgtggaatcgcaatgccaatttcccgaggaattacccactccgtcggcgccatcgttattgtctgccattggtgcgccactgcctgtagccatcgtattagttcccagaccagagggggctgctggtggctgtccgagaggctgggggtcaggtacggagtctgcgtctccagtctgaccgaaattcaatctctttcttgcaggctggttgcccgcttttccggttcccgaggaggagtctggctccacaggagagtgctctaccggcctcttttttcccggagccgtcttaacaggctcctcaaccaggcccagaggttcaagaaccctcttttttgcctggaagactgctcgtccgaggttgcccccaaaagacgtatcttctttaaggcgctcctgaaactccgcgtcggcgtggtcgtacttgaggtacgggttgtctccgctgtcgagctgccggtcgtaggccttgtcgtgctcgagggccgcggcgtctgcctcgttgaccggctctcccttgtcgagtccgttgaagggtccgaggtacttgtacccaggaagcacaagacccctgctgtcgtccttatgccgctctgcgggctttggtggtggtgggccaggtttgagcttccaccactgtcttattccttcagagagagtgtcctcgagccaatctggaagataaccatcggcagccatacctgatttaaatcatttattgttcagagatgcagtcatccaaatccacattgaccagatcgcaggcagtgcaagcgtctggcacctttcccatgatatgatgaatgtagcaaagtttctgatacgcctttttgacgacagaaacgggttgagattctgacacgggaaagcactctaaacagtctttctgtccgtgagtgaagcagatatttgaattctgattcattctctcgcattgtctgcagggaaacagcatcagattcatgcccacgtgacgagaacatttgttttggtacctgtccgcgtagttgatcgaagcttccgcgtctgacgtcgatggctgcgcaactgactcgcgcgcccgtttgggctcacttatatctgcgtcactgggggcgggtcttttcttggctccaccctttttgacgtagaattcatgctccacctcaaccacgtgatcctttgcccaccggaaaaagtctttcacttcctgcttggtgaccttcccaaagtcatgatccagacggcgggttagttcaaatttgaacatccggtcttgcaacggctgctggtgttcgaaggtcgttgagttcccgtcaatcacggcgcacatgttggtgttggaggtggcgatcacgggagtcgggtctatctgggccgaggacttgcacttttggtccacgcgcaccttgcttcctccgagaatggcttcggccgattccacgaccttggcggtcatctttccctcctcccaccagatcaccatcttgtcgacacagtcgttgaagggaaagttctcattggtccagttgacgcagcaagggcgaattcgtttaaacctgcaggaactagtcccttagtgagg

SEQ ID NO: 201 - protein, 735 aa, Artificial Sequence
  Synthetic polypeptide
MAADGYLPDWLEDTLSEGIRQWWKLKPGPPPPKPAERHKDDSRGLVLPGYKYLGPFNGLYKGEPVNEADAAALEHDKAYDRQLDSGDNPYLKYNHAGAEFQERLKEDTSFGGNLGRAVFQAKKRVLEPLGLVEEPVKTAPGKKRPVEHSPVEPDSSSGTGKAGNQPARKRLNFGQTGDADSVPDPQPLGQPPAAPSGLGSTTMATGSGAPVADNNEGADGVGNSSGNWHCDSQWLGDRVITTSTRTWALPTYNNHLYKQISSQSGASNDNHYFGYSTPWGYFDFNRFHCHFSPRDWQRLINNNWGFRPKRLNFKLFNIQVKEVTQNDGTTTIANNLTSTVQVFTDSEYQLPYVLGSAHQGCLPPFPADVFMVPQYGYLTLNNGSQAVGRSSFYCLEYFPSQMLRTGNNFQFSYTFEDVPFHSSYAHSQSLDRLMNPLIDQYLYYLNKTQSNSGTLQQSRLLFSQAGPTSMSLQAKNWLPGPCYRQQRLSKQANDNNNSNFPWTAATKYHLNGRDSLVNPGPAMASHKDDEEKFFPMHGTLIFGKQGTNANDADLDNVMITDEEEIRTTNPVATEQYGYVSNNLQDSNTGPTTGTVNHQGALPGMVWQDRDVYLQGPIWAKIPHTDGHFHPSPLMGGFGLKHPPPQIMIKNTPVPANPPTNFSSAKFASFITQYSTGQVSVEIEWELQKENSKRWNPEIQYTSNYNKSVNVDFTVDTNGVYSEPRPIGTRYLTRNL

SEQ ID NO: 202 - DNA, 2208 bp, Artificial Sequence
  Synthetic polynucleotide
atggctgccgatggttatcttccagattggctcgaggacactctctctgaaggaataagacagtggtggaagctcaaacctggcccaccaccgccaaagcccgcagagcggcataaggacgacagcaggggtcttgtgcttcctgggtacaagtacctcggacccttcaacggactctacaagggagagccggtcaacgaggcagacgccgcggccctcgagcacgacaaggcctacgaccggcagctcgacagcggagacaacccgtacctcaagtacaaccacgccggcgcggagtttcaggagcgccttaaagaagatacgtcttttgggggcaacctcggacgagcagtcttccaggccaaaaagagggttcttgaacctctgggcttggttgaggagcctgttaaaacggctccgggaaaaaagaggccggtagagcactctcctgtggagccagactcctcctcgggaaccggaaaagcgggcaaccagcctgcaagaaaaagattgaattttggtcagactggagacgcagactccgtacctgacccccagcctctcggacagccaccagcagccccctctggtctgggatctactacaatggctacaggcagtggcgcaccagtggcagacaataacgagggtgccgatggagtgggtaattcctcaggaaattggcattgcgattcccaatggctgggcgacagagtcatcaccaccagcacccgaacctgggctctgcccacctacaacaaccacctctacaagcaaatctccagccaatcaggagcctcaaacgacaaccactactttggctacagcaccccctgggggtattttgacttcaacagattccactgccacttttcaccacgtgactggcaaagactcatcaacaacaactggggattccgaccaaagagactcaacttcaagctctttaacattcaagtcaaagaggtcacgcagaatgacggtacgacgacgattgccaataaccttaccagcacggttcaggtgtttactgactcggagtaccagctcccgtacgtcctcggctcggcgcatcaaggatgcctcccgccgttcccagcagacgtcttcatggtgccacagtatggatacctcaccctgaacaacgggagtcaggcggtaggacgctcttccttttactgcctggagtactttccttctcagatgctgcgtactggaaacaactttcagttcagctacacctttgaagacgttcctttccacagcagctacgctcacagccagagtctggatcggctgatgaatcctctgatcgaccagtacctgtattatctgaacaagacacaatcaaatagtggaacccttcagcagtctcggctactgtttagccaagctggacccaccagcatgtctcttcaagctaaaaactggctgcctggaccttgctacagacagcagcgtctgtcaaagcaggcaaacgacaacaacaacagcaactttccctggactgcggctacaaagtatcatctaaatggccgggactcgttggttaatccaggaccagctatggccagccacaaagacgatgaagaaaagtttttccccatgcatggaaccctgatatttggtaaacaaggaacaaatgctaacgacgcggatttggacaatgtcatgattacagatgaagaagaaatccgcaccaccaatcccgtggctacggagcagtacggatatgtgtcaaataatttgcaagactcaaatactggtccaactactggaactgtcaatcaccaaggagcgttacctggtatggtgtggcaggatcgagacgtgtacctgcagggacccatttgggccaagattcctcacaccgatggacactttcatccttctccacttatgggaggttttggactcaaacacccacctcctcagatcatgattaaaaacactcccgttccagccaatcctcccacaaacttcagttctgccaagtttgcttctttcatcacacagtattccacgggacaagtcagcgtagagatcgagtgggagctgcagaaggagaacagcaaacgctggaaccccgagatccagtacacttccaactataacaaatctgttaatgtggactttactgtggacactaatggtgtgtattcagagcctcgccccattggcaccagatacctgactcgtaatctgtaa

SEQ ID NO: 203 - protein, 738 aa, Artificial Sequence
  Synthetic polypeptide
MAADGYLPDWLEDNLSEGIREWWDLKPGAPKPKANQQKQDDGRGLVLPGCKYLGPFNGLDKGEPVNAADAAALEHDKAYDQQLKAGDNPYLRYNHADAEFQERLQEDTSFGGNLGRAVFQAKKRVLEPLGLVEEGAKTAPGKKRPVEPSPQRSPDSSTGIGKTGQQPAKKRLNFGQTGDSESVPDPQPIGEPPAGPSGLGSGTMAAGGGAPMADNNEGADGVGSSSGNWHCDSTWLGDRVITTSTRTWALPTYNNHLYKQISNGTSGGSTNDNTYFGYSTPWGYFDFNRFHCHFSPRDWQRLINNNWGFRPKRLNFKLFNIQVKEVTQNEGTKTIANNLTSTIQVFTDSEYQLPYVLGSAHQGCPPPFPADVFMIPQYGYLTLNNGSQAVGRSSFYCLEYFPSQMRRTGNNFEFSYQFEDVPFHSSYAHSQSLDRLMNPLIDQYLYYLSRTQSTGGTAGTQQLLFSQAGPNNMSAQAKNWLPGPCYRQQRVSTTLSQNNNSNFAWTGATKYHLNGRDSLVNPGVAMATHKDDEERFFPSSGVLMFGKQGAGKDNVDYSSVMLTSEEEIKTTNPVATEQYGVVADNLQQQNAAPIVGAVNSQGALPGMVWQNRDVYLQGPIWAKIPHTDGNFHPSPLMGGFGLKHPPPQILIKNTPVPADPPTTFSQAKLASFITQYSTGQVSVEIEWELQKENSKRWNPEIQYTSNYNKSVNVDFTVDTNGVYSEPRPIGTRYLTRNL

SEQ ID NO: 204 - DNA, 2217 bp, Artificial Sequence
  Synthetic polynucleotide
atggctgccgatggttatcttccagattggctcgaggacaacctctctgagggcattcgcgagtggtgggacttgaaacctggagccccgaaacccaaagccaaccagcaaaagcaggacgacggccggggtctggtgcttcctggctgcaagtacctcggacccttcaacggactcgacaagggggagcccgtcaacgcggcggacgcagcggccctcgagcacgacaaggcctacgaccagcagctcaaagcgggtgacaatccgtacctgcggtataaccacgccgacgccgagtttcaggagcgtctgcaagaagatacgtcttttgggggcaacctcgggcgagcagtcttccaggccaagaagcgggttctcgaacctctcggtctggttgaggaaggcgctaagacggctcctggaaagaagagaccggtagagccatcaccccagcgttctccagactcctctacgggcatcggcaagacaggccagcagcccgcgaaaaagagactcaactttgggcagactggcgactcagagtcagtgcccgaccctcaaccaatcggagaaccccccgcaggcccctctggtctgggatctggtacaatggctgcaggcggtggcgctccaatggcagacaataacgaaggcgccgacggagtgggtagttcctcaggaaattggcattgcgattccacatggctgggcgacagagtcatcaccaccagcacccgaacctgggccctccccacctacaacaaccacctctacaagcaaatctccaacgggacatcgggaggaagcaccaacgacaacacctacttcggctacagcaccccctgggggtattttgactttaacagattccactgccacttctcaccacgtgactggcagcgactcatcaacaacaactggggattccggcccaagagactcaacttcaagctcttcaacatccaggtcaaggaggtcacgcagaatgaaggcaccaagaccatcgccaataaccttaccagcacgattcaggtctttacggactcggaataccagctcccgtacgtcctcggctctgcgcaccagggctgcccgcctccgttcccggcggacgtcttcatgattcctcagtacgggtacctgactctgaacaacggcagtcaggccgtgggccgttcctccttctactgcctggagtactttccttctcaaatgcggagaacgggcaacaactttgagttcagctaccagtttgaggacgtgccttttcacagcagctacgcgcatagccaaagcctggaccggctgatgaaccccctcatcgaccagtacctgtactacctgtctcggactcagtccacgggaggtaccgcaggaactcagcagttgctattttctcaggccgggcctaataacatgtcggctcaggccaaaaactggctacccgggccctgctaccggcagcaacgcgtctccacgacactgtcgcaaaataacaacagcaactttgcttggaccggtgccaccaagtatcatctgaatggcagagactctctggtaaatcccggtgtcgctatggcaacgcacaaggacgacgaagagcgattttttccatccagcggagtcttgatgtttgggaaacagggagctggaaaagacaacgtggactatagcagcgttatgctaaccagtgaggaagaaatcaaaaccaccaacccagtggccacagaacagtacggcgtggtggccgataacctgcaacagcaaaacgccgctcctattgtaggggccgtcaacagtcaaggagccttacctggcatggtctggcagaaccgggacgtgtacctgcagggtcctatctgggccaagattcctcacacggacggcaactttcatccttcgccgctgatgggaggctttggactgaaacacccgcctcctcagatcctgattaagaatacacctgttcccgcggatcctccaactaccttcagtcaagccaagctggcgtcgttcatcacgcagtacagcaccggacaggtcagcgtggaaattgaatgggagctgcagaaagagaacagcaagcgctggaacccagagattcagtatacttccaactataacaaatctgttaatgtggactttactgtggacactaatggtgtgtattcagagcctcgccccattggcaccagatacctgactcgtaatctgtaa

SEQ ID NO: 205 - DNA, 3167 bp, Artificial Sequence
  Synthetic polynucleotide
attgaatttagcggccgcgaattcgcccttcgcagagaccaaagttcaactgaaacgaattaaacggtttattgattaacaagcaattacagattacgagtcaggtacctggtgccaatggggcgaggctctgaatacacaccattagtgtccacagtaaagtccacattaacagatttgttgtagttggaagtgtactgaatctcgggattccagcgtttgctgttctccttctgcagctcccactcgatctccacgctgacctgccccgtggagtactgtgtaatgaaggaagcaaactttgccgcactgaaggtagtcgaaggattcgcaggtaccggggtgttcttgatgagaatctgcgggggagggtgtttaagtccgaatccgcccatgaggggagaggggtgaaaatgtccgtccgtgtgtggaatctttgcccagatgggcccctgcaggtacacgtctctgtcctgccacaccatgcctggaagaacgccttgtgtgttgacatctgaggtagctgcttgtgtgttgccgctctggaggttggtagatacagaaccatactgctccgtagccacgggattggtggtcctgatttcctcttcgtctgtaatcatgaccttttcaatgtccacattagtttttcccgagtcttgttttccaaagatgagaaccccgctctgaggaaaaaacttttcttcatcgtccttgtggctggccatggccgggcccggattcaccagagagtctcttccattaaggtggtacttggtagctccagtccacgagtattcactgttgttgttatccgcagatgtctttgatactcgctgctggcggtaacagggtccaggaagccagttcctagactggtcccgaatgtcacttgctccggcctgagaaaactgaagccttgactgcgtggtggttccgcttggagtgtttgttctgctcaagtaatacaggtactggtcgatgagaggattcatgagacggtccaaactctggctgtgggcgtagctgctgtggaaaggaacgtcctcaaaggtgtagctgaaggtaaagttgtttccggtacgcagcatctgagaaggaaagtactccaggcagtaaaatgaagagcgtcctactgcctgactcccgttgttcagggtgaggtatccatactgtggcaccatgaagacgtctgctgggaacggcgggaggcatccttgatgcgccgagccgaggacgtacgggagctggtactccgagtcagtaaacacctgaaccgtgctggtaaggttattggcaatcgtcgtcgtaccgtcattctgcgtgacctccttgacttgaatgttaaagagcttgaagttgagtcttttgggccggaatccccaattgttgttgatgagtctttgccagtcacgtggcgaaaagtggcagtggaatctgttgaagtcaaaatacccccaaggggtgctgtagccaaagtagtggttgtcgtttgaggctcctgattggctggaaatctgcttgtagaggtggttgttgtaggtgggcagagcccaggtgcgggtgctggtggtgatgactctgtcgcccatccatgtggaatcgcaatgccaatttcccgaggaattacccactccgtcggcgccctcgttattgtctgccattggtgcgccactgcctgtagccatcgtattagttcccagaccagagggggctgctggtggctgtccgagaggctgggggtcaggtacggagtctgcgtctccagtctgaccgaaattcaatctctttcttgcaggctgctggcccgcttttccggttcccgaggaggagtctggctccgcaggagagtgctctaccggcctcttttttcccggagccgtcttaacaggttcctcaaccaggcccagaggttcaagaaccctctttttcgcctggaagactgctcgtccgaggttgcccccaaaagacgtatcttctttaagacgctcctggaactccgcgtcggcgtggttgtacttggggtacgggttgtctccgctgtcgagctgccggtcgtaggccttgtcgtgctcgagggccgcggcgtctgcctcgttgaccggctctcccttgtcgagtccgttgaagggtccaaggtacttgtacccaggaagcacaagacccctgctgtcgtccttatgccgctctgcgggctttggtggtggtgggccaggtttgagcttccaccactgtcttattccttcagagagagtgtcctcgagccaatctggaagataaccatcggcagccatacctgatttaaatcatttattgttcagagatgcagtcatccaaatccacattgaccagatcgcaagcagtgcaagcgtctggcacctttcccatgatatgatgaatgtagcacagtttctgatacgcctttttgacgacagaaacgggttgagattctgacacgggaaagcactctaaacagtctttctgtccgtgagtgaagcagatatttgaattctgattcattctctcgcattgtctgcagggaaacagcatcagattcatgcccacgtgacgagaacatttgttttggtacctgtccgcgtagttgattgaagcttccgcgtctgacgtcgatggctgcgcaactgactcgcgcgcccgtttgggctcacttatatctgcgtcactgggggcgggtctttttttggctccaccctttttgacgtagaattcatgctctacctcaaccacgtgatcctttgcccaccggaaaaagtctttgacttcctgcttggtgaccttcccaaagtcatgatccagacggcgggtgagttcaaatttgaacatccggtcttgcaacggctgctggtgttcgaaggtcgttgagttcccgtcaatcactgcgcacatgttggtgttggaggtgacaatcacgggagtcgggtctatctgggccgaggacttgcatttctggtccacgcgcaccttgcttcctccgagaatggctttggccgactccacgaccttggcggtcatcttcccctcctcccaccagatcaccatcttgtcgacgcaatcattgaaaggaaagttctcattggtccagttgacgcagccgtagaaagggcgaattcgtttaaacctgcaggactagtccctttagtgagggt

SEQ ID NO: 206 - DNA, 3161 bp, Artificial Sequence
  Synthetic polynucleotide
aattgaatttagcggccgcgaattcgcccttcgcagagaccaaagttcaactgaaacgaattaaacggtttattgattaacaagcaattacagattacgagtcaggtatctggtgccaatggggcgaggctctgaatacacaccattagtgtccacagtaaagtccacattaacagatttgttgtagttggaagtgtactgaatctcgggattccagcgtttgctgttctccttctgcagctcccactcgatctccacgctgacctgccccgtggagtactgtgtaatgaaggaagcaaactttgccgcactgaaggtagtcgaaggattcgcaggtaccggggtgttcttgatgagaatctgcgggggagggtgtttaagtccgaatccgcccatgaggggagaggggtgaaaatgtccgtccgtgtgtggaatctttgcccagatgggcccctgcaggtacacgtctctgtcctgccacaccatgcctggaagaacgccttgtgtgttgacatctgaggtagctgcttgtgtgttgccgctctggaggttggtagatacagaaccatactgctccgtagccacgggattggtggtcctgatttcctcttcgtctgtaatcatgaccttttcaatgtccacattagtttttcccgagtcttgttttccaaagatgagaaccccgctctgaggaaaaaacttttcttcatcgtccttgtggctggccatggccgggcccggattcaccagagagtctcttccattaaggtggtacttggtagctccagtccacgagtattcactgttgttgttatccgcagatgtctttgatactcgctgctggcggtaacagggtccaggaagccagttcctagactggtcccgaatgtcacttgctccggcctgagaaaactgaagccttgactgcgtggtggttccgcttggagtgtttgttctgctcaagtaatacaggtactggtcgacgagaggattcatgagacggtccaaactctggctgtgggcgtagctgctgtggaaaggaacgtcctcaaaggtgtagctgaaggtaaagttgtttccggtacgcagcatctgagaaggaaagtactccaggcagtaaaatgaagagcgtcctactgcctgactcccgttgttcagggtgaggtatccatactgtggcaccatgaagacgtctgctgggaacggcgggaggcatccttgatgcgccgagccgaggacgtacgggagctggtactccgagtcagtaaacacctgaaccgtgctggtaaggttattggcaatcgtcgtcgtaccgtcattctgcgtgacctccttgacttgaatgttaaagagcttgaagttgagtcttttgggccgggatccccaattgttgttgatgagtctttgccagtcacgtggcgaaaagtggcagtggaatctgttgaagtcaaaatacccccaaggggtgctgtagccaaagtagtggttgtcgtttgaggctcctgattggctggaaatctgcctgtagaggtggttgttgtaggtgggcagagcccaggtgcgggtgctggtggtgatgactctgtcgcccatccatgtggaatcgcaatgccaatttcccgaggaattacccactccgtcggcgccctcgttattgtctgccattggtgcgccactgcctgtagccatcgtattagttcccagaccagagggggctgctggtggctgtccgagaggctgggggtcaggtacggagtctgcgtctccagtctgaccgaaattcaatctccttcttgcaggctgctggcccgcttttccggttcccgaggaggagtctggctccgcaagagagtgctctaccggcctcttttttcccggagccgtcttaacaggttcctcaaccaggcccagaggttcaagaaccctctttttcgcctggaagactgctcgtccgaggttgcccccaaaagacgtatcttctttaagacgctcctggaactccgcgtcggcgtggttgtacttgaggtacgggttgtctccgccgtcgagctgccggtcgtaggccttgtcgtgctcgagggccgcggcgtctgcctcgttgaccggctctcccttgtcgagtccgttgaagggtccaaggtacttgtacccaggaagcacaagacccctgctgtcgtccttatgccgctctgcgggctttggtggtggtgggccaggtttgagcttccaccactgtcttattccttcagagagagtgtcctcgagccaatctggaagataaccatcggcagccatacctgatttaaatcatttattgttcagagatgcagtcatccaaatccacattgaccagatcgcaagcagtgcaagcgtctggcacctttcccatgatatgatgaatgtagcacagtttctgatacgcctttttgacgacagaaacgggttgagattctgacacgggaaagcactctaaacagtctttctgtccgtgagtgaagcagatatttgaattctgattcattctctcgcattgtctgcagggaaacagcatcagattcatgcccacgtgacgagaacatttgttttggtacctgtccgcgtagttgattgaagcttccgcgtctgacgtcgatggctgcgcaactgactcgcgcgcccgtttgggctcacttatatctgcgtcactgggggcgggtctttttttggctccaccctttttgacgtagaattcatgctctacctcaaccacgtgatcctttgcccaccggaaaaagtctttgacttcctgcttggtgaccttcccaaagtcatgatccagacggcgggtgagttcaaatttgaacatccggtcttgcaacggctgctggtgttcgaaggtcgttgagttcccgtcaatcactgcgcacatgttggtgttggaggtgacaatcacgggagtcgggtctatctgggccgaggacttgcatttctggtccacgcgcaccttgcttcctccgagaatggctttggccgactccacgaccttggcggtcatcttcccctcctcccaccagatcaccatcttgtcgacgcaatcattgaaaggaaagttctcattggtccagttgacgcagcaagggcgaattcgtttaaacctgcaggactagtccctttagtgaggg

SEQ ID NO: 207 - DNA, 3172 bp, Artificial Sequence
  Synthetic polynucleotide
gattgaatttagcggccgcgaattcgcccttgctgcgtcaactggaccaatgagaactttcccttcaacgattgcgtcgacaagatggtgatctggtgggaggagggcaagatgaccgccaaggtcgtggagtccgccaaggccattctgggtggaagcaaggtgcgcgtggaccaaaagtgcaagtcatcggcccagatcgaccccacgcccgtgatcgtcacctccaacaccaacatgtgcgccgtgatcgacgggaacagcaccaccttcgagcaccagcagcccctgcaggaccgcatgttcaagttcgagctcacccgccgtctggagcacgactttggcaaggtgaccaagcaggaagtcaaagagttcttccgctgggctcaggatcacgtgactgaggtggcgcatgagttctacgtcagaaagggcggagccaccaaaagacccgcccccagtgacgcggatataagcgagcccaagcgggcctgcccctcagttgcggagccatcgacgtcagacgcggaagcaccggtggactttgcggacaggtaccaaaacaaatgttctcgtcacgcgggcatgcttcagatgctgtttccctgcaagacatgcgagagaatgaatcagaatttcaacgtctgcttcacgcacggggtcagagactgctcagagtgcttccccggcgcgtcggaatctcaacccgtcgtcagaaaaaagacgtatcagaaactgtgcgcgattcatcatctgctggggcgggcacccgagattgcgtgttcggcctgcgatctcgtcaacgtggacttggatgactgtgtttctgagcaataaatgacttaaaccaggtatggctgctgacggttatcttccagattggctcgaggacaacctctctgagggcattcgcgagtggtgggacctgaaacctggagcccccaagcccaaggccaaccagcagaagcaggacgacggccggggtctggtgcttcctggctacaagtacctcggacccttcaacggactcgacaagggggagcccgtcaacgcggcggacgcagcggccctcgagcacgacaaggcctacgaccagcagctcaaagcgggtgacaatccgtacctgcggtataaccacgccgacgccgagtttcaggagcgtctgcaagaagatacgtcttttgggggcaacctcgggcgagcagtcttccaggccaagaagcgggttctcgaacctctcggtctggttgaggaagctgctaagacggctcctggaaagaagagaccggtagaaccgtcacctcagcgttcccccgactcctccgcgggcatcggcaagaaaggccagcagcccgctaaaaagagactgaactttggtcagactggcgactcagagtcagtccccgaccctcaaccaatcggagaaccaccagcaggcccctctggtctgggatctggtacaatggctgcaggcggtggcgctccaatggcagacaataacgaaggcgccgacggagtgggtagttcctcaggaaattggcattgcgattccacatggctgggcgacagagtcatcaccaccagcacccgaacctgggccctgcccacctacaacaaccacctctacaagcaaatatccaatgggacatcgggaggaagcaccaacgacaacacctacttcggctacagcaccccctgggggtattttgacttcaacagattccactgccacttctcaccacgtgactggcagcgactcatcaacaacaactggggattccggccaaaaagactcagcttcaagctcttcaacatccaggtcaaggaggtcacgcagaatgaaggcaccgagaccatcgccaataaccttaccagcacgattcaggtatttacggactcggaataccagctgccgtacgtcctcggctccgcgcaccagggctgcctgcctccgttcccggcggacgtcttcatgattccccagtacggctaccttacactgaacaatggaagtcaagccgtaggccgttcctccttctactgcctggaatattttccatctcaaatgctgcgaactggaaacaattttgaattcagctacaccttcgaggacgtgcctttccacagcagctgcgcacacagccagagctcggaccgactgatgaatcctctcatcgaccagtacctgtactacttatccagaactcggtccacaggaggaactcaaggtacccagcaattgttattttctcaagctgggcctgcaaacatgtcggctcaggctaagaactggctacctggaccttgctaccggcagcagcgagtctctacgacactgtcgcaaaacaacaacagcaactttgcttggactggtgccaccaaatatcacctgaacggaagagactctttggtaaatcccggtgtcgccatggcaacccacaaggacgacgaggaacgcttcttcccgtcgagtggagtcctgatgtttggaaaacagggtgctggaagagacaatgtggactacagcagcgttatgctaaccagcgaagaagaaattaaaaccactaaccctgtagccacagaacaatacggtgtggtggctgacaacttgcagcaaaccaatacagggcctattgtgggaaatgtcaacagccaaggagccttacctggcatggtctggcagaaccgagacgtgtacctgcagggtcccatctgggccaagattcctcacacggacggcaacttccacccttcaccgctaatgggaggatttggactgaagcacccacctcctcagatcctgatcaagaacacgccggtacctgcggatcctccaacaacgttcagccaggcgaaattggcttccttcattacgcagtacagcaccggacaggtcagcgtggaaatcgagtgggagctgcagaaggagaacagcaaacgctggaacccagagattcagtacacttcaaactactacaaatctacaaatgtggactttgctgtcaatacagagggaacttattctgagcctcgccccattggtactcgttacctcacccgtaatctgtaattgctggttaatcaataaaccgtttgattcgtttcagttgaactttggtctctgcgaagggcgaattcgtttaaacctgcaggactagtccctttagtgagg

SEQ ID NO: 208 - DNA, 3172 bp, Artificial Sequence
  Synthetic polynucleotide
gattgaatttagcggccgcgaattcgcccttgctgcgtcaactggaccaatgagaactttcccttcaacgattgcgtcgacaagatggtgatctggtgggaggagggcaagatgaccgccaaggtcgtggagtccgccaaggccattctgggtggaagcaaggtgcgcgtggaccaaaagtgcaagtcatcggcccagatcgaccccacgcccgtgatcgtcacctccaacaccaacatgtgcgccgtgatcggcgggaacagcaccaccttcgagcaccagcagcccctgcaggaccgcatgttcaagttcgagctcacccgccgtctggagcacgactttggcaaggtgaccaagcaggaagtcaaagagttcttccgctgggctcaggatcacgtgactgaggtggcgcatgagttctacgtcagaaagggcggagccaccaaaagacccgcccccagtgacgcggatataagcgagcccaagcgggcctgcccctcagttgcggagccatcgacgtcagacgcggaagcaccggtggactttgcggacaggtaccaaaacaaatgttctcgtcacgcgggcatgcttcagatgctgtttccctgcaagacatgcgagagaatgaatcagaatttcaacgtctgcttcacgcacggggtcagagactgctcagagtgcctccccggcgcgtcagaatctcaacccgtcgtcagaaaaaagacgtatcagaaactgtgcgcgattcatcatctgctggggcgggcacccgagattgcgtgttcggcctgcgatctcgtcaacgtggacttggatgactgtgtttctgagcaataaatgacttaaaccaggtatggctgctgacggttatcttccagattggctcgaggacaacctctctgagggcattcgcgagtggtgggacctgaaacctggagcccccaagcccaaggccaaccagcagaagcaggacgacggccggggtctggtgcttcttggctacaagtacctcggacccttcaacggactcgacaagggggagcccgtcaatgcggcggacgcagcggccctcgagcacgacaaggcctacgaccagcagctcaaagcgggtgacaatccgtacctgcggtataaccacgccgacgccgagtttcaggagcgtctgcaagaagatacgtcttttgggggcaacctcgggcgagcagtcttccaggccaagaagcgggttctcgaacctctcggtctggttgaggaagctgctaagacggctcctggaaagaagagaccggtagaaccgtcacctcagcgttcccccgactcctccacgggcatcggcaagaaaggccagcagcccgctaaaaagagactgaactttggtcagactggcgactcagagtcagtccccgaccctcaaccaatcggagaaccaccagcaggcccctctggtctgggatctggtacaatggctgcaggcggtggcgctccaatggcagacaataacgaaggcgccgacggagtgggtagttcctcaggaaattggcattgcgattccacatggctgggcgacagagtcatcaccaccagcacccgaacctgggccctgcccacctacaacaaccacctctacaagcaaatatccaatgggacatcgggaggaagcaccaacgacaacacctacttcggctacagcaccccctgggggtattttgacttcaacagattccactgccacttctcaccacgtgactggcagcgactcatcaacaacaactggggattccggccaaaaagactcagcttcaagctcttcaacatccaggtcaaggaggtcacgcagaatgaaggcaccaagaccatcgccaataaccttaccagcacgattcaggtatttacggactcggaataccagctgccgtacgtcctcggctccgcgcaccagggctgcctgcctccgttcccggcggacgtcttcatgattccccagtacggctaccttacactgaacaatggaagtcaagccgtaggccgttcctccttctactgcctggaatattttccatctcaaatgctgcgaactggaaacaattttgaattcagctacaccttcgaggacgtgcctttccacagcggctacgcacacagccagagcttggaccgactgatgaatcctctcatcgaccagtacctgtactacttatccagaactcagtccacaggaggaactcaaggtacccagcaattgttattttctcaagctgggcctgcaaacatgtcggctcaggctaagaactggctacctggaccttgctaccggcagcagcgagtctctacgacactgtcgcaaaacaacaacagcaactttgcttggactggtgccaccaaatatcacctgaacggaagagactctttggtaaatcccggtgtcgccatggcaacccacaaggacgacgaggaacgcttcttcccgtcgagtggagtcctgatgtttggaaaacagggtgctggaagagacaatgtggactacagcagcgttatgctaaccagcgaagaagaaattaaaaccactaaccctgtagccacagaacaatacggtgtggtggctgacaacttgcagcaaaccaatacagggcctattgtgggaaatgtcaacagccaaggagccttacctggcatggtctggcagaaccgagacgtgtacctgcagggtcccatctgggccaagattcctcacacggacggcaacttccacccttcaccgctaatgggaggatttggactgaagcacccacctcctcagatcctgatcaagaacacgccggtacctgcggatcctccaacgacgttcagccaggcgaaattggcttccttcattacgcagtacagcaccggacaggtcagcgtggaaatcgagtgggagctgcagaaggagaacagcaaacgctggaacccagagattcagtacacttcaaactactacaaatctacaaatgtggactttgctgtcaatacagagggaacttattctgagcctcgccccattggtactcgttacctcacccgtaatctgtaattgctggttaatcaataaaccgtttgattcgtttcagttgaactttggtctctgcgaagggcgaattcgtttaaacctgcaggactagtccctttagtgagg

SEQ ID NO: 209 - DNA, 2208 bp, Artificial Sequence
  Synthetic polynucleotide
atggctgccgatggttatcttccagattggctcgaggacactctctctgaaggaataagacagtggtggaagctcaaacctggcccaccaccaccaaagcccgcagagcggcataaggacgacagcaggggtcttgtgcttcctgggtacaagtacctcggacccttcaacggactcgacaagggagagccggtcaacgaggcagacgccgcggccctcgagcacgacaaggcctacgaccggcagctcgaaagcggagacaacccgtacctcaagtacaaccacgccgacgcggagtttcaggagcgtcttaaagaagatacgtcttttgggggcaacctcggacgagcagtcttccaggcgaaaaagagggttcttgaacctctgggcctggttgaggagcctgttaaaacggctccgggaaaaaagaggccggtagagcactctcctgtggagccagactcctcctcgggaaccggaaaagcgggccagcagcctgcgagaaaaagattgaattttggtcagactggagacgcagactccgtacctgacccccagcctctcggacagccaccagcagccccctctggtctgggatctactacaatggcttcaggcagtggcgcaccagtggcagacaataacgagggtgccgatggagtgggtaattcctcaggaaattggcattgcgattcccaatggctgggcgacagagtcatcaccaccagcacccgaacctgggccctgcccacctacaacaaccacctctacaagcaaatctccagccaatcaggagcctcaaacgacaaccactactttggctacagcaccccctgggggtattttgacttcaacagattccactgccacttttcaccacgtgactggcaaagactcatcaacaacagctggggattccgacccaaaagactcaacttcaagctctttaacattcaagtcaaagaggtcacgcagaatgacggtacgacgacgattgccaataaccttaccagcacggttcaagtgtttaccgactcggagtaccagctcccgtacgtcctcggctcggcgcatcaaggatgcctcccgccgttcccagcagacgtctttatggtcccacagtatggatacctcaccctgaacaacgggagtcaggcggtaggacgctcttccttttactgcctggagtactttccttctcagatgctgcgtactggaaacaactttcagttcagctacacctttgaagacgttcccttccacagcagctacgctcacagccagagtctggatcggctgctgaatcctctgatcgaccagtacctatattatctgaacaagacacaatcaaatagtggaactcttcagcagtctcggctactgtttagccaagctggacccaccagcatgtctcttcaagctaaaaactggctgcctggaccttgctacagacagcagcgtctgtcaaagcaggcaaacgacaacaacaacagcaactttccctggactgcggctacaaagtatcatctaaatggccgggactcgttggttaatccaggaccagctatggccagccacaaagacgatgaagaaaagtttttccccatgcatggaaccctgatatttggtaaacaaggaacaaatgctaacgacgcggatttggacaatgtcatgattacagatgaagaagaaatccgcaccaccaatcccgtggctacggagcagtacggatatgtgtcaaataatttgcaaaactcaaatactggtccaactactggaactgtcaatcaccaaggagcgttacctggtatggtgtggcaggatcgagacgtgtacctgcagggacccatttgggccaagattcctcacacggacgggcactttcatccttctccactaatgggaggttttgggctcaaacacccgcctcctcagatcatgatcaaaaacactcccgttccagccaatcctcctacaaacttcagttcttccaagtttgcttctttcatcacacagtattccacggggcaggtcagcgtggagatcgagtgggagctgcagaaggagaacagcaaacgctggaatcccgaaattcagtatacttccaactacaacaaatctgttaatgtggactttactgtggacactaatggtgtgtattcagagcctcgccccattggcaccagatacccgactcgtaatctgtaa

SEQ ID NO: 210 - protein, 735 aa, Artificial Sequence
  Synthetic polypeptide
MAADGYLPDWLEDTLSEGIRQWWKLKPGPPPPKPAERHKDDSRGLVLPGYKYLGPFNGLDKGEPVNEADAAALEHDKAYDRQLESGDNPYLKYNHADAEFQERLKEDTSFGGNLGRAVFQAKKRVLEPLGLVEEPVKTAPGKKRPVEHSPVEPDSSSGTGKAGQQPARKRLNFGQTGDADSVPDPQPLGQPPAAPSGLGSTTMASGSGAPVADNNEGADGVGNSSGNWHCDSQWLGDRVITTSTRTWALPTYNNHLYKQISSQSGASNDNHYFGYSTPWGYFDFNRFHCHFSPRDWQRLINNSWGFRPKRLNFKLFNIQVKEVTQNDGTTTIANNLTSTVQVFTDSEYQLPYVLGSAHQGCLPPFPADVFMVPQYGYLTLNNGSQAVGRSSFYCLEYFPSQMLRTGNNFQFSYTFEDVPFHSSYAHSQSLDRLLNPLIDQYLYYLNKTQSNSGTLQQSRLLFSQAGPTSMSLQAKNWLPGPCYRQQRLSKQANDNNNSNFPWTAATKYHLNGRDSLVNPGPAMASHKDDEEKFFPMHGTLIFGKQGTNANDADLDNVMITDEEEIRTTNPVATEQYGYVSNNLQNSNTGPTTGTVNHQGALPGMVWQDRDVYLQGPIWAKIPHTDGHFHPSPLMGGFGLKHPPPQIMIKNTPVPANPPTNFSSSKFASFITQYSTGQVSVEIEWELQKENSKRWNPEIQYTSNYNKSVNVDFTVDTNGVYSEPRPIGTRYPTRNL

SEQ ID NO: 211 - DNA, 2208 bp, Artificial Sequence
  Synthetic polynucleotide
atggctgccgatggttatcttccagattggctcgaggacactctctctgaaggaataagacagtggtggaagctcaaacctggcccaccaccaccaaagcccgcagagcggcataaggacgacagcaggggtcttgtgcttcctgggtacaagtacctcggacccttcaacggactcgacaagggagagccggtcaacgaggcagacgccgcggccctcgagcacgacaaggcctacgaccggcagctcgacagcggagacaacccgtacctcaagtacaaccacgccgacgcggagtttcaggagcgtcttaaagaagatacgtcttttgggggcaacctcggacgagcagtcttccaggccaaaaagaggattcttgaacctctgggcctggttgaggaacctgttaagacggctccgggagaaaagaggccggtagagcactctcctgcggagccagactcctcctcgggaaccggaaaagcgggccagcagcctgcaagaaagagattgaattttggccagactggagacgcagactcagtacctgacccccagcctctcggacagccaccagcagccccctctggtctgggaactaatacgatggcttcaggcagtggcgcaccaatggcagacaataacgagggcgccgacggagtgggtaattcctcgggaaattggtattgcgattccacatggatgggcgacagagtcatcaccaccagcacccgcacctgggccctgcccacctacaacaaccatctgtacaagcaaatctccagccagtctggagccagcaacgacaaccactactttggctacagcaccccctgggggtattttgacttcaacagattccactgccacttctccccacgtgactggcaaagactcatcaacaacaactggggattccggcccaagagactcagcttcaagctctttaacattcaagtcaaagaggtcacgcagaatgacggtacgacgacgattgccaataaccttaccagcacggttcaggtgtttactgactcggagtaccagctcccgtacgtcctcggctcggcgcatcaaggatgcctcccgccgttcccagcagacgtcttcatggtgccacagtatggatacctcaccctgaacaacggcagtcaggcggtaggacgctcttccttttactgcctggagtactttccttctcagatgcttcgtaccggaaacaactttaccttcagctacacctttgaagacgttcctttccatagcagctacgctcacagccaaagtctggaccgtctcatgaatcctctcatcgaccagtacctgtattacttgagcagaacaaacactccaagcggaaccaccacgatgtccaggcttcagttttctcaggccggagcaagtgacattcgggaccagtctagaaactggcttcctggaccctgttaccgccagcagcgagtatcaaagacagctgcggacaacaacaacagtgattactcgtggactggagctaccaagtaccacctcaatggaagagactctctggtgaatccgggcccagctatggccagccacaaggacgatgaagaaaaatattttcctcagagcggggttctcatctttggaaaacaagactcgggaaaaactaatgtggacattgaaaaggttatgattacagacgaagaggaaatcaggaccaccaatcccgtggctacggagcagtatggttctgtatctaccaacctccagagcggcaacacacaagcagctacctcagatgtcaacacacaaggcgttcttccaggcatggtctggcaggacagagacgtgtacctgcaggggcccatctgggcaaagattccacacacggacggacattttcacccctctcccctcgtgggcggattcggacttaaacaccctcctccacaaattctcatcaagaacaccccggtacctgcgaatccttcgaccactttcagtgcggcaaagtttgcttccttcatcacacagtactccacggggcaggtcagcgtggagatcgagtgggagctgcagaaggagaacagcaaacgctggaatcccgaaattcagtacacttccaactacaacaaatctgttaatgtggactttactgtggacactaatggtgtgtattcagagcctcgccccattggcaccagatacctgactcgtaatctgtaa

SEQ ID NO: 212 - protein, 735 aa, Artificial Sequence
  Synthetic polypeptide
MAADGYLPDWLEDTLSEGIRQWWKLKPGPPPPKPAERHKDDSRGLVLPGYKYLGPFNGLDKGEPVNEADAAALEHDKAYDRQLDSGDNPYLKYNHADAEFQERLKEDTSFGGNLGRAVFQAKKRILEPLGLVEEPVKTAPGEKRPVEHSPAEPDSSSGTGKAGQQPARKRLNFGQTGDADSVPDPQPLGQPPAAPSGLGTNTMASGSGAPMADNNEGADGVGNSSGNWYCDSTWMGDRVITTSTRTWALPTYNNHLYKQISSQSGASNDNHYFGYSTPWGYFDFNRFHCHFSPRDWQRLINNNWGFRPKRLSFKLFNIQVKEVTQNDGTTTIANNLTSTVQVFTDSEYQLPYVLGSAHQGCLPPFPADVFMVPQYGYLTLNNGSQAVGRSSFYCLEYFPSQMLRTGNNFTFSYTFEDVPFHSSYAHSQSLDRLMNPLIDQYLYYLSRTNTPSGTTTMSRLQFSQAGASDIRDQSRNWLPGPCYRQQRVSKTAADNNNSDYSWTGATKYHLNGRDSLVNPGPAMASHKDDEEKYFPQSGVLIFGKQDSGKTNVDIEKVMITDEEEIRTTNPVATEQYGSVSTNLQSGNTQAATSDVNTQGVLPGMVWQDRDVYLQGPIWAKIPHTDGHFHPSPLVGGFGLKHPPPQILIKNTPVPANPSTTFSAAKFASFITQYSTGQVSVEIEWELQKENSKRWNPEIQYTSNYNKSVNVDFTVDTNGVYSEPRPIGTRYLTRNL

SEQ ID NO: 213 - DNA, 2209 bp, Artificial Sequence
  Synthetic polynucleotide
atggctgccgatggttatcctccagattggctcgaggacactctctctgaagggataagacagtggtggaagctcaaacctggcccaccaccaccaaagcccgcagagcggcataaggacgacagcaggggtcttgtgcttcctgggtacaagtacctcggacccttcaacggactcgacaagggggagccggtcaacgaggcagacgccgcggccctcgagcacgacaaggcctacgaccggcagctcgacagcggagacaacccgtacctcaagtacaaccacgccgacgcagagtttcaggagcgccttaaagaagatacgtcttttgggggcaacctcggacgagcagtcttccaggcgaaaaagagggttcttgaacctctgggcctggttgaggaacctgttaagacggctccgggaaaaaagaggccggtagagcactctcctgtggagccagactcctcctcgggaaccggaaaagcgggccagcggcctgcaagaaaaagattaaattttggtcagactggagacgcagactccgtacctgacccccagcctctcggacagccaccagcagccccctctggtctgggatctactacaatggctacaggcagtggcgcaccaatggcagacaataacgagggtgccgatggagtgggtaattcctcaggaaattggcattgcgattcccaatggctgggcgacagagtcatcaccaccagcacccgaacctgggccctgcccacatacaacaaccacctctacaagcaaatctccagccaatcaggagccagcaacgacaaccactactttggctacagcaccccctgggggtattttgacttcaacagattccactgccacttttcaccacgtgactggcaaagactcatcaacaacaactggggattccggcccaaaagactcaacttcaagctctttaatattcaagtcaaagaggtcacgcagaatgacggtacgacgacgattgccaataaccttaccagcacggttcaggtgtttactgactcggagtaccagctcccgtacgtcctgggctcggcgcatcaaggatgcctcccgccgtttccagcggacgtcttcatggtcccacagtatggatacctcaccctgaacaacgggagtcaggcggtaggacgctcttccttttactgcctggagtactttccttctcagatgctgcgtactggaaacaactttcagttcagctacacttttgaagacgtgcctttccacagcagctacgctcacagccagagtctggatcggctgatgaatcctctgatcgaccagtacctgtattatctgaacaagacacaaacaaatagtggaactcttcagcagtctcggctactgtttagccaagctggaccaaccaacatgtctcttcaagctaaaaactggctgcctggaccttgctacagacagcagcgtctgtcaaaacaggcaaacgacaacaacaacagcaactttccctggactgcagctacaaagtatcatctaaatggccgggactcgttggttaatccaggaccagctatggccagtcacaaggatgacgaagaaaagtttttccccatgcatggaaccctgatatttggtaaacaaggaacaaatgccaacgacgcggatttggaaaatgtcatgattacagatgaagaagaaatcagggccaccaatcccgtggctacggagcagtacgggactgtgtcaaataatttgcaaaactcaaacactggtccaactactggaactgtcaatcgccaaggagcgttacctggtatggtgtggcaggatcgagacgtgtacctgcagggacccatttgggccaagattcctcacaccgatggacactttcatccttctccactgatgggaggttttggactcaaacacccgcctcctcagatcatgatcaaaaacactcccgttccagccaatcctcccacaaacttcagttctgccaagtttgcttctttcatcacacagtattccacgggacaggtcagcgtggagatcgagtgggagctgcagaaggagaacagcaaacgctggaatcccgaaattcagtacacttccaactacaacaagtctgttaatgtggactttactgtggacactaatggtgtgtattcagagcctcgccccattggcaccagatacctgactcgtaatctgtaat

SEQ ID NO: 214 - protein, 735 aa, Artificial Sequence
  Synthetic polypeptide
MAADGYPPDWLEDTLSEGIRQWWKLKPGPPPPKPAERHKDDSRGLVLPGYKYLGPFNGLDKGEPVNEADAAALEHDKAYDRQLDSGDNPYLKYNHADAEFQERLKEDTSFGGNLGRAVFQAKKRVLEPLGLVEEPVKTAPGKKRPVEHSPVEPDSSSGTGKAGQRPARKRLNFGQTGDADSVPDPQPLGQPPAAPSGLGSTTMATGSGAPMADNNEGADGVGNSSGNWHCDSQWLGDRVITTSTRTWALPTYNNHLYKQISSQSGASNDNHYFGYSTPWGYFDFNRFHCHFSPRDWQRLINNNWGFRPKRLNFKLFNIQVKEVTQNDGTTTIANNLTSTVQVFTDSEYQLPYVLGSAHQGCLPPFPADVFMVPQYGYLTLNNGSQAVGRSSFYCLEYFPSQMLRTGNNFQFSYTFEDVPFHSSYAHSQSLDRLMNPLIDQYLYYLNKTQTNSGTLQQSRLLFSQAGPTNMSLQAKNWLPGPCYRQQRLSKQANDNNNSNFPWTAATKYHLNGRDSLVNPGPAMASHKDDEEKFFPMHGTLIFGKQGTNANDADLENVMITDEEEIRATNPVATEQYGTVSNNLQNSNTGPTTGTVNRQGALPGMVWQDRDVYLQGPIWAKIPHTDGHFHPSPLMGGFGLKHPPPQIMIKNTPVPANPPTNFSSAKFASFITQYSTGQVSVEIEWELQKENSKRWNPEIQYTSNYNKSVNVDFTVDTNGVYSEPRPIGTRYLTRNL

SEQ ID NO: 215 - DNA, 2208 bp, Artificial Sequence
  Synthetic polynucleotide
atggctgccgatggttatcttccagattggctcgaggacactctctctgaaggaataagacagtggtggaagctcaaacctggcccaccaccaccaaagcccgcagagcggcataaggacgacagcaggggtcttgtgcttcctgggtacaggtacctcggacccttcaacggactcgacaagggagagccggtcaacgaggcagacgccgcggccctcgagcacgacaaggcctacgaccggcagctcgacagcggagacaacccgtacctcaagtacaaccacgtcgacgcggagtttcaggagcgtcttaaagaagatacgtcttttgggggcaacctcggacgagcagtcttccaggccaaaaagaggattcttgaacctctgggcctggttgaggaacctgttaaggcggctccgggagaaaagaggccggtagagcactctcctgcggagccagactcctcctcgggaaccggaaaagcgggccagcagcctgcaagaaagagattgaattttggtcagactggagacgcagactcagtacctgacccccagcctctcggacagccaccagcagccccctctggtctgggaactaatacgatggcttcaggcagtggcgcaccaatggcagacaataacgagggcgccgacggagtgggtaattcctcgggaaattggcattgcgattccacatggatgggcgacagagtcatcaccaccagcacccgcacctgggccctgcccacctacaacaaccatctgtacaagcaaatctccagccagtctggagccagcaacgacaaccactactttggctacagcaccccctgggggcattttgacttcaacagattccactgccacttctccccacgtgactggcaaagactcatcaacaacaactggggattccggcccaagagactcagcttcaagctctttaacattcaagtcaaagaggtcacgcagaatgacggtacgacgacgattgccaataaccttaccagcacggttcaggtgtttactgactcggagtaccagctcccgtacgtcctcggctcggcgcatcaaggatgcctcccgccgttcccagcagacgtcttcatggtgccacagtatggatacctcaccctgaacaacggcagtcaggcggtaggacgctcttccttttactgcctggagtactttccttctcagatgcttcgtaccggaaacaactttaccttcagctacacctttgaagacgttcctttccatagcagctacgctcacagccaaagtctggaccgtctcatgaatcctctcatcgaccagtacctgtattacttgagcagaacaaacactccaagcggaaccaccacgatgtccaggcttcagttttctcaggccggagcaagtgacattcgggaccagtctagaaactggcttcctggaccctgttaccgccagcagcgagtatcaaagacagctgcggacaacaacaacagtgattactcgtggactggagctaccaagtaccacctcaatggaagagactctctggtgaatccgggcccagctatggccagccacaaggacgatgaagaaaaatattttcctcagagcggggttctcatctttggaaaacaagactcgggaaaaactaatgtggacattgaaaaggttatgattacagacgaagaggaaatcaggaccaccaatcccgtggctacggagcagtatggttctgtatctaccaacctccagagcggcaacacacaagcagctacctcagatgtcaacacacaaggcgttcttccaggcatggtctggcaggacagagacgtgtacctgcaggggcccatctgggcaaagattccacacacggacggacattttcacccctctccccccatgggcggattcggacttaaacaccctcctccacaaattctcatcaagaacaccccggtacctgcgaatccttcgaccactttcagtgcggcaaagtttgcttccttcatcacacagtactccacggggcaggtcagcgtggagatcgagtgggagctgcagaaggagaacagcaaacgctggaatcccgaaattcagtacacttccaactacaacaaatctgttaatgtggactttactgtggacactaatggtgtgtattcagagcctcgccccattggcgccagatacctgactcgtaatctgtaa

SEQ ID NO: 216 - protein, 735 aa, Artificial Sequence
  Synthetic polypeptide
MAADGYLPDWLEDTLSEGIRQWWKLKPGPPPPKPAERHKDDSRGLVLPGYRYLGPFNGLDKGEPVNEADAAALEHDKAYDRQLDSGDNPYLKYNHVDAEFQERLKEDTSFGGNLGRAVFQAKKRILEPLGLVEEPVKAAPGEKRPVEHSPAEPDSSSGTGKAGQQPARKRLNFGQTGDADSVPDPQPLGQPPAAPSGLGTNTMASGSGAPMADNNEGADGVGNSSGNWHCDSTWMGDRVITTSTRTWALPTYNNHLYKQISSQSGASNDNHYFGYSTPWGHFDFNRFHCHFSPRDWQRLINNNWGFRPKRLSFKLFNIQVKEVTQNDGTTTIANNLTSTVQVFTDSEYQLPYVLGSAHQGCLPPFPADVFMVPQYGYLTLNNGSQAVGRSSFYCLEYFPSQMLRTGNNFTFSYTFEDVPFHSSYAHSQSLDRLMNPLIDQYLYYLSRTNTPSGTTTMSRLQFSQAGASDIRDQSRNWLPGPCYRQQRVSKTAADNNNSDYSWTGATKYHLNGRDSLVNPGPAMASHKDDEEKYFPQSGVLIFGKQDSGKTNVDIEKVMITDEEEIRTTNPVATEQYGSVSTNLQSGNTQAATSDVNTQGVLPGMVWQDRDVYLQGPIWAKIPHTDGHFHPSPPMGGFGLKHPPPQILIKNTPVPANPSTTFSAAKFASFITQYSTGQVSVEIEWELQKENSKRWNPEIQYTSNYNKSVNVDFTVDTNGVYSEPRPIGARYLTRNL

SEQ ID NO: 217 - DNA, 2208 bp, Artificial Sequence
  Synthetic polynucleotide
atggctgccgatggttatcttccagattggctcgaggacaccctctctgaaggaataagacagtggtggaagctcaaacctggcccaccaccaccaaagcccgcagagcggcataaggacgacagcaggggtcttgtgcttcctgggtacaagtacctcggacccttcaacggactcgacaagggagagccggtcaacgaggcagacgccgcggccctcgagcacgacaaggcctacgaccggcagctcgacagcggagataacccgtacctcaagtacaaccacgccgacgcggagtttcaggagcgccttaaagaggatacgtcttttgggggcaacctcggacgagcagtcttccaggccaaaaagaggattcttgaacctctgggcctggttgaggaacctgttaagacggctccgggaaaaaagaggccggtagagcactctcctgcggagccagactcctcctcgggaaccggaaaagcgggccagcagcctgcaagaaagagattgaattttggtcagactggagacgcagactcagtacctgacccccggcctctcggacagccaccagcagccccctctggtctgggaactaatacgatggcttcaggcagtggcgcaccaatggcagacaataacgagggcgccgacggagtgggtaattcctcgggaaattggcattgcgattccacatggatgggcgacagagtcatcaccaccagcacccgcacctgggccctgcccacctacaacaaccatctgtacaagcaaatctccagccagtctggagccagcaacgacaaccactactttggctacagcaccccctgggggtattttgacttcaacagattccactgccacttctccccacgtgactggcaaagactcatcaacaacaactggggattccggcccaagagactcagcttcaagctctttaacattcaagtcaaagaggtcacgcagaatgacggtacgacgacgattgccaataaccttaccagcacggttcaggtgtttactgactcggagtaccagctcccgtacgtcctcggctcggcgcatcaaggatgcctcccgccgttcccagcagacgtcttcatggtgccacagtatggatacctcaccctgaacaacggcagtcaggcggtaggacgctcttccttttactgcctggagtactttccttctcagatgcttcgtaccggaaacaactttaccttcagctacacctttgaagacgttcctttccatagcagctacgctcacagccaaagtctggaccgtctcatgaatcctctcatcgaccagtacctgtattacttgagcagaacaaacactccaagcggaaccaccacgatgtccaggcttcagttttctcaggccggagcaagtgacattcgggaccagtctagaaactggcttcctggaccctgttaccgccagcagcgagtatcaaagacagctgcggacaacaacaacagtgattactcgtggactggagctaccaagtaccacctcaatggaagagactctctggtgaatccgggcccagctatggccagccacaaggacgatgaagaaaaatattttcctcagagcggggttctcatctttggaaaacaagactcgggaaaaactaatgtggacattgaaaaggttatgattacagacgaagaggaaatcaggaccaccaatcccgtggctacggagcagtatggttctgtatctaccaacctccagagcggcaacacacaagcagctacctcagatgtcaacacacaaggcgttcttccaggcatggtctggcaggacagagacgtgtacctgcaggggcccatctgggcaaagattccacacacggacggacattttcacccctctcccctcatgggcggattcggacttaaacaccctcctccacaaattctcatcaagaacaccccggtacctgcgaatccttcgaccactttcagtgcggcaaagtttgcttccttcatcacacagtactccacggggcaggtcagcgtggagatcgagtgggagctgcagaaggagaacagcaaacgctggaatcccgaaattcagtacacttccaactacaacaaatctgttaatgtggactttactgtggacactaatggtgtgtattcagagcctcgccccattggcaccagatacctgactcgtaatctgtaa

SEQ ID NO: 218 - protein, 735 aa, Artificial Sequence
  Synthetic polypeptide
MAADGYLPDWLEDTLSEGIRQWWKLKPGPPPPKPAERHKDDSRGLVLPGYKYLGPFNGLDKGEPVNEADAAALEHDKAYDRQLDSGDNPYLKYNHADAEFQERLKEDTSFGGNLGRAVFQAKKRILEPLGLVEEPVKTAPGKKRPVEHSPAEPDSSSGTGKAGQQPARKRLNFGQTGDADSVPDPRPLGQPPAAPSGLGTNTMASGSGAPMADNNEGADGVGNSSGNWHCDSTWMGDRVITTSTRTWALPTYNNHLYKQISSQSGASNDNHYFGYSTPWGYFDFNRFHCHFSPRDWQRLINNNWGFRPKRLSFKLFNIQVKEVTQNDGTTTIANNLTSTVQVFTDSEYQLPYVLGSAHQGCLPPFPADVFMVPQYGYLTLNNGSQAVGRSSFYCLEYFPSQMLRTGNNFTFSYTFEDVPFHSSYAHSQSLDRLMNPLIDQYLYYLSRTNTPSGTTTMSRLQFSQAGASDIRDQSRNWLPGPCYRQQRVSKTAADNNNSDYSWTGATKYHLNGRDSLVNPGPAMASHKDDEEKYFPQSGVLIFGKQDSGKTNVDIEKVMITDEEEIRTTNPVATEQYGSVSTNLQSGNTQAATSDVNTQGVLPGMVWQDRDVYLQGPIWAKIPHTDGHFHPSPLMGGFGLKHPPPQILIKNTPVPANPSTTFSAAKFASFITQYSTGQVSVEIEWELQKENSKRWNPEIQYTSNYNKSVNVDFTVDTNGVYSEPRPIGTRYLTRNL

SEQ ID NO: 219 - DNA, 2208 bp, Artificial Sequence
  Synthetic polynucleotide
atggctgccgatggttatcttccagattggctcgaggacactctctctgaaggaataagacagtggtggaagctcaaacctggcccaccaccaccaaagcccgcagagcggcataaggacgacagcaggggtcttgtgcttcctgggtacaagtacctcggacccttcaacggactcgacaagggagagccggtcaacgaggcagacgccgcggccctcgagcacgacaaggcctacgaccggcagctcgacagcggagacaacccgtacctcaagtacaaccacgccgacgcggagtttcaggagcgccttaaaggagatacgtcttttgggggcaacctcggacgagcagtcttccaggccaaaaagaggattcttgaacctctgggcctggttgaggaacctgttaagacggctccgggaaaaaagaggccggtagagcactctcctgcggagccagactcctcctcgggaaccggaaaagcgggccagcagcctgcaagaaagagattgaattttggtcagactggagacgcagactcagtacctgacccccagcctctcggacagccaccagcagccccctctggtctgggaactaatacgatggcttcaggcagtggcgcaccaatggcagacaataacgagggcgccgacggagtgggtaattcctcgggaaattggcattgcgattccacatggatgggcggcagagtcatcaccaccagcacccgcacctgggccctgcccacctacaacaaccatctgtacaagcaaatctccagccagtctggagccagcaacgacaaccactactttggctacagcaccccctgggggtattttgacttcaacagattccactgccacttctccccacgtgactggcaaagactcatcaacaacaactggggattccggcccaagagactcagcttcaagctctttaacattcaagtcaaagaggtcacgcagaatgacggtacgacgacgattgccaataaccttaccagcacggttcaggtgtttactgactcggagtaccagctcccgtacgtcctcggctcggcgcatcaaggatgcctcccgccgttcccagcagacgtcttcatggtgccacagtatggatacctcaccctgaacaacggcagtcaggcggtaggacgctcttccttttactgcctggagtactttccttctcagacgcttcgtaccggaaacaactttaccttcagctacacctttgaagacgttcctttccatagcagctacgctcacagccaaagtctggaccgtctcatgaatcctctcatcgaccagtacctgtattacttgagcagaacaaacactccaagcggaaccaccacgatgtccaggcttcagttttctcaggccggagcaagtgacattcgggaccagtctagaaactggcttcctggaccctgttaccgccagcagcgagtatcaaagacagctgcggacaacaacaacagtgattactcgtggactggagctaccaagtaccacctcaatggaagagactctctggtgaatccgggcccagctatggccagccacaaggacgatgaagaaaaatattttcctcagagcggggttctcatctttggaaaacaagactcgggaaaaactaatgtggacattgaaaaggttatgattacagacgaagaggaaatcaggaccaccaatcccgtggctacggagcagtatggttctgtatctaccaacctccagagcggcaacacacaagcagctacctcagatgtcaacacacaaggcgttcttccaggcatggtctggcaggacagagacgtgtacctgcaggggcccatctgggcaaagattccacacacggacggacattttcacccctctcccctcatgggcggattcggacttaaacaccctcctccacaaattctcatcaagaacaccccggtacctgcgaatccttcgaccactttcagtgcggcaaagtttgcttccttcatcacacagtactccacggggcaggtcagcgtggagatcgagtgggagctgcagaaggagaacagcaaacgctggaatcccgaaattcagtacacttccaactacaacaaatctgttaatgtggactttactgtggacactaatggtgtgtattcagagcctcgccccattggcaccagatacctgactcgtaatctgtaa

SEQ ID NO: 220 - protein, 735 aa, Artificial Sequence
  Synthetic polypeptide
MAADGYLPDWLEDTLSEGIRQWWKLKPGPPPPKPAERHKDDSRGLVLPGYKYLGPFNGLDKGEPVNEADAAALEHDKAYDRQLDSGDNPYLKYNHADAEFQERLKGDTSFGGNLGRAVFQAKKRILEPLGLVEEPVKTAPGKKRPVEHSPAEPDSSSGTGKAGQQPARKRLNFGQTGDADSVPDPQPLGQPPAAPSGLGTNTMASGSGAPMADNNEGADGVGNSSGNWHCDSTWMGGRVITTSTRTWALPTYNNHLYKQISSQSGASNDNHYFGYSTPWGYFDFNRFHCHFSPRDWQRLINNNWGFRPKRLSFKLFNIQVKEVTQNDGTTTIANNLTSTVQVFTDSEYQLPYVLGSAHQGCLPPFPADVFMVPQYGYLTLNNGSQAVGRSSFYCLEYFPSQTLRTGNNFTFSYTFEDVPFHSSYAHSQSLDRLMNPLIDQYLYYLSRTNTPSGTTTMSRLQFSQAGASDIRDQSRNWLPGPCYRQQRVSKTAADNNNSDYSWTGATKYHLNGRDSLVNPGPAMASHKDDEEKYFPQSGVLIFGKQDSGKTNVDIEKVMITDEEEIRTTNPVATEQYGSVSTNLQSGNTQAATSDVNTQGVLPGMVWQDRDVYLQGPIWAKIPHTDGHFHPSPLMGGFGLKHPPPQILIKNTPVPANPSTTFSAAKFASFITQYSTGQVSVEIEWELQKENSKRWNPEIQYTSNYNKSVNVDFTVDTNGVYSEPRPIGTRYLTRNL

SEQ ID NO: 221 - DNA, 2208 bp, Artificial Sequence
  Synthetic polynucleotide
atggctgccgatggttatcttccagattggctcgaggacactctctctgaaggaataagacagtggtggaagctcaaacctggcccaccaccaccaaagcccgcagagcggcataaggacgacagcaggggtcttgtgcttcctgggtacaagtacctcggacccttcaacggactcgacaagggagagccggtcaacgaggcagacgccgcggccctcgagcacgacaaggcctacgaccggcagctcgacagcggagacaacccgtacctcaagtacaaccacgccgacgcggagtttcaggagcgtcttaaagaagatacgtcttttgggggcaacctcggacgagcagtcttccaggccaaaaagaggattcttgaacctctgggcctggttgaggaacctgttaagacggctccgggaaaaaagaggccggtagagcactctcctgcggagccagactcctcctcgggaaccggaaaagcgggccagcagcctgcaagaaagagattgaattttggtcagactggagacgcagactcagtacctgacccccagcctctcggacagccaccagcagccccctctggtctgggaactaatacgatggcttcaggcagtggcgcaccaatggcagacaataacgagggcgccgacggagtgggtaattcctcgggaaattggcattgcgattccacatggatgggcgacagagtcatcaccaccagcacccgcacctgggccctgcccacctgcaacaaccatctgtacaagcaaatctccagccagtctggagccagcaacgacaaccactactttggctacagcaccccctgggggtattttgacttcaacagattccactgccacttctccccacgtgactggcaaagactcatcaacaacaactggggattccggcccaagagactcagcttcaagctctttaacattcaagtcaaagaggtcacgcagaatgacggtacgacgacgattgccaataaccttaccagcacggttcaggtgtttactgactcggagtaccagctcccgtacgtcctcggctcggcgcatcaaggatgcctcccgccgttcccagcagacgtcttcatggtgccacagtatggatacctcaccctgaacaacggcagtcaggcggtaggacgctcttccttttactgcctggagtattttccttctcagatgcttcgtaccggaaacaactttaccttcagctacacctttgaagacgttcctttccatagcagctacgctcacagccaaagtctggaccgtctcatgaatcctctcatcgaccagtacctgtattacttgagcagaacaaacactccaagcggaaccaccacgatgtccaggcttcagttttctcaggccggagcaagtgacattcgggaccagtctagaaactggcttcctggaccctgttaccgccagcagcgagtatcaaagacagctgcggacaacaacaacagtgattactcgtggactggagctaccaagtaccacctcaatggaagagactctctggtgaatccgggcccagctatggccagccacaaggacgatgaagaaaaatattttcctcagagcggggttctcatctttggaaaacaagactcgggaaaaactaatgtggacattgaaaaggttatgattacagacgaagaggaaatcaggaccaccaatcccgtggctacggagcagtatggttctgtatctacctacctccagagcggcaacacacaagcagctacctcagatgtcaacacacaaggcgttcttccaggcatggtctggcaggacagagacgtgtacctgcgggggcccatctgggcaaagattccacacacggacggacattttcacccctctcccctcatgggcggatttggacttaaacaccctcctccacaaattctcatcaagaacaccccggtacctgcgaatccttcgaccactttcagtgcggcaaagtttgcttccttcatcacacagtactccacggggcaggtcagcgtggagatcgagtgggagctgcagaaggagaacagcaaacgctggaatcccgaaattcagtacacttccaactacaacaaatctgttaatgtggactttactgtggacactaatggtgtgtattcagagcctcgccccattggcaccagatacctgactcgtaatctgtaa

SEQ ID NO: 222 - protein, 735 aa, Artificial Sequence
  Synthetic polypeptide
MAADGYLPDWLEDTLSEGIRQWWKLKPGPPPPKPAERHKDDSRGLVLPGYKYLGPFNGLDKGEPVNEADAAALEHDKAYDRQLDSGDNPYLKYNHADAEFQERLKEDTSFGGNLGRAVFQAKKRILEPLGLVEEPVKTAPGKKRPVEHSPAEPDSSSGTGKAGQQPARKRLNFGQTGDADSVPDPQPLGQPPAAPSGLGTNTMASGSGAPMADNNEGADGVGNSSGNWHCDSTWMGDRVITTSTRTWALPTCNNHLYKQISSQSGASNDNHYFGYSTPWGYFDFNRFHCHFSPRDWQRLINNNWGFRPKRLSFKLFNIQVKEVTQNDGTTTIANNLTSTVQVFTDSEYQLPYVLGSAHQGCLPPFPADVFMVPQYGYLTLNNGSQAVGRSSFYCLEYFPSQMLRTGNNFTFSYTFEDVPFHSSYAHSQSLDRLMNPLIDQYLYYLSRTNTPSGTTTMSRLQFSQAGASDIRDQSRNWLPGPCYRQQRVSKTAADNNNSDYSWTGATKYHLNGRDSLVNPGPAMASHKDDEEKYFPQSGVLIFGKQDSGKTNVDIEKVMITDEEEIRTTNPVATEQYGSVSTYLQSGNTQAATSDVNTQGVLPGMVWQDRDVYLRGPIWAKIPHTDGHFHPSPLMGGFGLKHPPPQILIKNTPVPANPSTTFSAAKFASFITQYSTGQVSVEIEWELQKENSKRWNPEIQYTSNYNKSVNVDFTVDTNGVYSEPRPIGTRYLTRNL

SEQ ID NO: 223 - DNA, 2208 bp, Artificial Sequence; identical to SEQ ID NO: 217
  Synthetic polynucleotide

SEQ ID NO: 224 - protein, 735 aa, Artificial Sequence; identical to SEQ ID NO: 218
  Synthetic polypeptide

SEQ ID NO: 225 - DNA, 2208 bp, Artificial Sequence
  Synthetic polynucleotide
atggctgccgatggttatcttccagattggctcgaggacactctctctgaaggaataagacagtggtggaagctcaaacctggcccaccaccaccaaagcccgcagagcggcataaggacggcagcaggggtcttgtgcttcctgggtacaagtacctcggacccttcaacggactcgacaagggagagccggtcaacgaggcagacgccgcggccctcgagcacgacaaggcctacgaccggcagctcaacagcggagacaacccgtacctcaagtacaaccacgccgacgcggagtttcaggagcgccttaaagaagatacgtcttttgggggcaacctcggacgagcagtcttccaggcaaaaaagagggttcttgaacctctgggcctggttgaggagcctgttaaaacggctccgggaaaaaagagaccggtagagcactctcctgcggagccagactcctcctcgggaaccggaaaagcgggccagcagcctgcaagaaagagattgaattttggtcagactggagacgcagactccgtacctgacccccagcctctcggacagccaccagcagccccctctggtctgggatctactacaatggctacaggcagtggcgcaccaatggcagacaataacgagggtgccgatggagtgggtaattcctcaggaaattggcattgcgattcccaatggctgggcgacagagtcatcaccacaagcactcgaacctgggccctgcccacctacaacaaccacctctacaagcaaatctccagccaatcaggagcctcaaacgacaaccactattttggctacagcaccccttgggggtattttgacttcaacagattccactgccacttttcaccacgtgactggcaaagactcatcaacaacaactggggattccgacccaagagactcaacttcaagctctttaacattcaagtcaaagaggtcacgcagaatgacggtacgacgacgattgccaataaccttaccagcacggttcaggtgtttactgactcggagtaccagctcccgtacgtcctcggctcggcgcatcaaggatgcctcccgccgttcccagcggacgtcttcatggtcccacagtatggatacctcaccctgaacaacgggagtcaggcggtaggacgctctcccttttactgcctggagtactttccttctcagatgctgcgtactggaaacaactttcagttcagctacacttttgaagacgtgcctttccacagcagctacgctcacagccagagtctggatcggctgatgaatcctctgatcgaccagtacctgtattatctgaacaagacacaaacaaatagtggaactcttcagcagtctcggctactgtttagccaagctggacccaccaacatgtctcttcaagctaaaaactggctgcctggaccttgctacagacagcagcgtctgtcaaagcaggcaaacgacaacaacaacagcaactttccctggactgcagctacaaagtatcatctaaatggccgggactcgttggttaatccaggaccagctatggccagtcacaaggatgacgaagaaaagtttttccccatgcatggaaccctgatatttggtaaacaaggaacaaatgccaacgacgcggatttggaaaatgtcatgattacagatgaagaagaaatcaggaccaccaatcccgtggctacggagcagtacgggactgtgtcaaataatttgcaaaactcaaacactggtccaactactggaactgtcaatcaccaaggagcgttacctggtatggtgtggcaggatcgagatgtgtaccttcagggacccatttgggccaagattcctcacaccgatggacactttcatccttctccactgatgggaggttttggactcaaacacccgcctcctcagattatgatcaaaaacactcccgttccagccaatcctcctacaaacttcagttctgccaagtttgcttctttcatcacacagtattccacggggcaggtcagcgtggagatcgagtgggagctgcagaaggagaacagcaaacgctggaatcccgaaattcagtacacttccaactacaacaaatctgttaatgtggactttactgtggacaataatggcgtgtactcagagcctcgccccattggcaccagatacctgactcgtaatctgtaa

SEQ ID NO: 226 - protein, 735 aa, Artificial Sequence
  Synthetic polypeptide
MAADGYLPDWLEDTLSEGIRQWWKLKPGPPPPKPAERHKDGSRGLVLPGYKYLGPFNGLDKGEPVNEADAAALEHDKAYDRQLNSGDNPYLKYNHADAEFQERLKEDTSFGGNLGRAVFQAKKRVLEPLGLVEEPVKTAPGKKRPVEHSPAEPDSSSGTGKAGQQPARKRLNFGQTGDADSVPDPQPLGQPPAAPSGLGSTTMATGSGAPMADNNEGADGVGNSSGNWHCDSQWLGDRVITTSTRTWALPTYNNHLYKQISSQSGASNDNHYFGYSTPWGYFDFNRFHCHFSPRDWQRLINNNWGFRPKRLNFKLFNIQVKEVTQNDGTTTIANNLTSTVQVFTDSEYQLPYVLGSAHQGCLPPFPADVFMVPQYGYLTLNNGSQAVGRSPFYCLEYFPSQMLRTGNNFQFSYTFEDVPFHSSYAHSQSLDRLMNPLIDQYLYYLNKTQTNSGTLQQSRLLFSQAGPTNMSLQAKNWLPGPCYRQQRLSKQANDNNNSNFPWTAATKYHLNGRDSLVNPGPAMASHKDDEEKFFPMHGTLIFGKQGTNANDADLENVMITDEEEIRTTNPVATEQYGTVSNNLQNSNTGPTTGTVNHQGALPGMVWQDRDVYLQGPIWAKIPHTDGHFHPSPLMGGFGLKHPPPQIMIKNTPVPANPPTNFSSAKFASFITQYSTGQVSVEIEWELQKENSKRWNPEIQYTSNYNKSVNVDFTVDNNGVYSEPRPIGTRYLTRNL

SEQ ID NO: 227 - DNA, 2208 bp, Artificial Sequence
  Synthetic polynucleotide
atggctgccgatggttatcttccagattggctcgaggacactctctctgaaggaataagacagtggtggaagctcaaacctggcccaccaccaccaaagcccgcagagcggcataaggacgacagcaggggtcttgtgcttcctgggtacaagtacctcggacccttcaacggactcgacaagggagagccggtcaacgaggcagacgccgcggccctcgagcacgacaaggcctacgaccggcagctcgacagcggagacaacccgtacctcaagtacaaccacgccgacgcggagtttcaggagcgtcttaaagaagatacgtcttttgggggcaacctcggacgagcagtcttccaggccaaaaagaggattcttgaacctctgggcctggttgaggaacctgttaagacggctccgggaaaaaagaggccggtagagcactctcctgcggagccagactcctcctcgggaaccggaaaagcgggccagcagcctgcaagaaagagattgaattttggtcagactggagacgcagactcagtacctgacccccagcctctcggacagccaccagcagccccctctggtctgggaactaatacgatggcttcaggcagtggcgcaccaatggcagacaataacgagggcgccgacggagtgggtaattcctcgggaaattggcattgcgattccacatggatgggcgacagagtcatcaccaccagcacccgcacctgggccctgcccacctacaacaaccatctgtacaagcaaatctccagccagtctggagccagcaacgacaaccactactttggctacagcaccccctgggggtattttgacttcaacagattccactgccacttctccccacgtgactggcaaagactcatcaacaacaactggggattccggcccaagagactcagcttcaagctctttaacattcaagtcaaagaggtcacgcagaatgacggtacgacgacgattgccaataaccttaccagcacggttcaggtgtttactgactcggagtaccagctcccgtacgtcctcggctcggcgcatcaaggatgcctcccgccgttcccagcagacgtcttcatggtgccacagtatggatacctcaccctgaacaacggcagtcaggcggtaggacgctcttccttttactgcctggagtactttccttctcagatgcttcgtaccggaaacaactttaccttcagctacacctttgaagacgttcctttccatagcagctacgctcacagccaaagtctggaccgtctcatgaatcctctcatcgaccagtacctgtattacttgagcagaacaaacactccaagcggaaccaccacgatgtccaggcttcagttttctcaggccggagcaagtgacattcgggaccagtctagaaactggcttcctggaccctgttaccgccagcagcgagtatcaaagacagctgcggacaacaacaacagtgattactcgtggactggagctaccaagtaccacctcaatggaagagactctctggtgaatccgggcccagctatggccagccacaaggacgatgaagaaaaatattttcctcagagcggggttctcatctttggaaaacaagactcgggaaaaactaatgtggacattgaaaaggttatgattacagacgaagaggaaatcaggaccaccaatcccgtggctacggagcagtatggttctgtatctaccaacctccagagcggcaacacacaagcagctacctcagatgtcaacacacaaggcgttcttccaggcatggtctggcaggacagagacgtgtacctgcaggggcccatctgggcaaagattccacacacggacggacattttcacccctctcccctcatgggcggattcggacttaaacaccctcctccacaaattctcatcaagaacaccccggtacctgcgaatccttcgaccactttcagtgcggcaaagtttgcttccttcatcacacagtactccacggggcaggtcagcgtggagatcgagtgggagctgcagaaggagaacagcaaacgctggaatcccgaaattcagtacacttccaactacaacaaatctgttaatgtggactttactgtggacactaatggtgtgtattcagagcctcgccccattggcaccagatacctgactcgtaatctgtaa

SEQ ID NO: 228 - protein, 735 aa, Artificial Sequence
  Synthetic polypeptide
MAADGYLPDWLEDTLSEGIRQWWKLKPGPPPPKPAERHKDDSRGLVLPGYKYLGPFNGLDKGEPVNEADAAALEHDKAYDRQLDSGDNPYLKYNHADAEFQERLKEDTSFGGNLGRAVFQAKKRILEPLGLVEEPVKTAPGKKRPVEHSPAEPDSSSGTGKAGQQPARKRLNFGQTGDADSVPDPQPLGQPPAAPSGLGTNTMASGSGAPMADNNEGADGVGNSSGNWHCDSTWMGDRVITTSTRTWALPTYNNHLYKQISSQSGASNDNHYFGYSTPWGYFDFNRFHCHFSPRDWQRLINNNWGFRPKRLSFKLFNIQVKEVTQNDGTTTIANNLTSTVQVFTDSEYQLPYVLGSAHQGCLPPFPADVFMVPQYGYLTLNNGSQAVGRSSFYCLEYFPSQMLRTGNNFTFSYTFEDVPFHSSYAHSQSLDRLMNPLIDQYLYYLSRTNTPSGTTTMSRLQFSQAGASDIRDQSRNWLPGPCYRQQRVSKTAADNNNSDYSWTGATKYHLNGRDSLVNPGPAMASHKDDEEKYFPQSGVLIFGKQDSGKTNVDIEKVMITDEEEIRTTNPVATEQYGSVSTNLQSGNTQAATSDVNTQGVLPGMVWQDRDVYLQGPIWAKIPHTDGHFHPSPLMGGFGLKHPPPQILIKNTPVPANPSTTFSAAKFASFITQYSTGQVSVEIEWELQKENSKRWNPEIQYTSNYNKSVNVDFTVDTNGVYSEPRPIGTRYLTRNL

SEQ ID NO: 229 - DNA, 2208 bp, Artificial Sequence
  Synthetic polynucleotide
atggctgccgatggttatcttccagattggctcgaggacactctctctgaaggaataagacagtggtggaagctcaaacctggcccaccaccaccaaagcccgcagagcggcataaggacgacagcaggggtcttgtgcttcctgggtacaagtacctcggacccttcaacggactcgacaagggagagccggtcaacgaggcagacgccgcggccctcgagcacgacaaggcctacgaccggcagctcgacagcggagacaacccgtacctcaagtacaaccacgccgacgcggagtttcaggagcgtcttaaagaagatacgtcttttgggggcaacctcggacgagcagtcttccaggccaaaaagaggattcttgaacctctgggcctggttgaggaacctgttaagacggctccgggaaaaaagaggccggtagagcactctcctgcggagccagactcctcctcgggaaccggaaaagcgggccagcagcctgcaagaaagagattgaattttggtcagactggagacgcagactcagtacctgacccccagcctctcggacagccaccagcagccccctctggtctgggaactaatacgatggcttcaggcagtggcgcaccaatggcagacaataacgagggcgccgacggagtgggtaattcctcgggaaattggcattgcgattccacatggatgggcgacagagtcatcaccaccagcacccgcacctgggccctgcccacctacaacaaccatctgtacaagcaaatctccagccagtctggagccagcaacgacaaccactactttggctacagcaccccctgggggtatttcgacttcaacagattccactgccacttctccccacgtgactggcaaagactcatcaacaacaactggggattccggcccaagagactcagcttcaagctctttaacattcaagtcaaagaggtcacgcagaatgacggtacgacgacgattgccaataaccttaccagcacggttcaggtgtttactgactcggggtaccagctcccgtacgtcctcggctcggcgcatcaaggatgccttccgccgttcccagcagacgtcttcatggtgccacagtatggatacctcaccctgaacaacggcagtcaggcggtaggacgctcttccttttactgcctggagtactttccttctcagatgcttcgtaccggaaacaactttaccttcagctacacctttgaagacgttcctttccatagcagctacgctcacggccaaagtctggaccgtctcatgaatcctctcatcgaccagtacctgtattacttgagcagaacaaacactccaagcggaaccaccacgatgtccaggcttcagttttctcaggccggagcaagtgacgttcgggaccagtctagaaactggcttcctggaccctgttaccgccagcagcgagtatcaaagacagctgcggacaacaacaacagtgattactcgtggactggagctaccaagtaccacctcaatggaagagactctctggtgaatccgggcccagctatggccagccacaaggacgatgaagaaaaatattttcctcagagcggggttctcgtctttggaaaacaagactcgggaaaaactaatgtggacattgaaaaggttatgattacagacgaagaggaaatcaggaccaccaatcccgcggctacggagcagtatggttctgtatctaccaacctccagagcggcaacacacaagcagctacctcagatgtcaacacacaaggcgttcttccaggcatggtctggcaggacagagacgtgtacctgcaggggcccatctgggcaaagattccacacacggacggacattttcacccctctcccctcatgggcggattcggacttaaacaccctcctccacaaattctcatcaagaacaccccggtacctgcgaatccttcgaccactttcagtgcggcaaagtttgtttccttcatcacacagtactccacggggcaggtcagcgtggagatcgagtgggagctgcagaaggagaacagcaaacgctggaatcccgaaattcagtacacttccaactacaacaaatctgttaatgtggactttactgtggacactaatggtgtgtattcagagcctcgccccattggcaccagatacctgactcgtaatctgtaa

SEQ ID NO: 230 - protein, 735 aa, Artificial Sequence
  Synthetic polypeptide
MAADGYLPDWLEDTLSEGIRQWWKLKPGPPPPKPAERHKDDSRGLVLPGYKYLGPFNGLDKGEPVNEADAAALEHDKAYDRQLDSGDNPYLKYNHADAEFQERLKEDTSFGGNLGRAVFQAKKRILEPLGLVEEPVKTAPGKKRPVEHSPAEPDSSSGTGKAGQQPARKRLNFGQTGDADSVPDPQPLGQPPAAPSGLGTNTMASGSGAPMADNNEGADGVGNSSGNWHCDSTWMGDRVITTSTRTWALPTYNNHLYKQISSQSGASNDNHYFGYSTPWGYFDFNRFHCHFSPRDWQRLINNNWGFRPKRLSFKLFNIQVKEVTQNDGTTTIANNLTSTVQVFTDSGYQLPYVLGSAHQGCLPPFPADVFMVPQYGYLTLNNGSQAVGRSSFYCLEYFPSQMLRTGNNFTFSYTFEDVPFHSSYAHGQSLDRLMNPLIDQYLYYLSRTNTPSGTTTMSRLQFSQAGASDVRDQSRNWLPGPCYRQQRVSKTAADNNNSDYSWTGATKYHLNGRDSLVNPGPAMASHKDDEEKYFPQSGVLVFGKQDSGKTNVDIEKVMITDEEEIRTTNPAATEQYGSVSTNLQSGNTQAATSDVNTQGVLPGMVWQDRDVYLQGPIWAKIPHTDGHFHPSPLMGGFGLKHPPPQILIKNTPVPANPSTTFSAAKFVSFITQYSTGQVSVEIEWELQKENSKRWNPEIQYTSNYNKSVNVDFTVDTNGVYSEPRPIGTRYLTRNL

SEQ ID NO: 231 - DNA, 2208 bp, Artificial Sequence
  Synthetic polynucleotide
atggctgccgatggttatcttccagattggctcgaggacactctctctgaaggaataagacagtggtggaaactcaaacctggcccaccaccaccaaagcccgcagagcggcataaggacgacagcaggggtcttgtgcttcctgggtacaagtacctcggacccttcaacggactcgacaagggagagccggtcaacgaggcagacgccgcggccctcgagcacgacaaggcctacgaccggcagctcgacagcggagacaacccgtacctcaagtacaaccacgccgacgcggagtttcaggagcgccttaaagaagatacgtcttttgggggcaacctcggacgagcagtcttccaggcaaaaaagagggttctggaacctctgagcctggttgaggagcctgttaagacggctccgggaaaaaagaggccggtagagcactctcccgcagagccagattcctcctccggaactggaaagtcgggcaaccagcctgcaagaaagagattgaatttcggtcagactggagactcagactccgtacctgacccccagcctctcggacagccaccagcagccccctctggtctgggaactaatacgatggctacaggcagtggcgcaccaatggcagacaataacgagggcgccgacggagtgggtaattcctcgggaaattggcattgcgattccacatggatgggcgacagagtcatcaccaccagcacccgaacctgggccctgcccacctacaacaaccatctgtacaagcaaatatccagccagtctggagccagcaacgacaatcactactttggctacagcaccccctgggggtattttgacttcaacagattccactgccacttttcaccacgtgactggcaaagactcatcaacaacaactggggattccgacccaagagactcaacttcaagctctttaacattcaagtcaaagaggtcacgcagaatgacggtacgacgacgattgccaataaccttaccagcacggttcaggtgtttactgactcggagtaccagctcccgtacgtcctcggctcggcgcatcaaggatgcctcccgccgttcccagcagacgtcttcatggtgccacagtatggatacctcaccctgaacaacgggagtcaggcagtaggacgctcttcattttactgcctagagtactttccttctcagatgctgcgtaccggaaacaactttaccttcagctacacctttgaggacgttcctttccacagcagctacgctcacagccagagtttggaccgtctcatgaatcctctcatcgaccagtacctgtattacttgagcagaacaaacactccaagcggaaccaccacgcagtccaggcttcagttttctcaggccggagcgagtgacattcaggaccagtctaggaactggcttcctggaccctgttaccgtcagcagcgagtatcaaagacatctgcggataacaacaacagtgaatactcgtggactggagctaccaagtaccacctcaatggcagagactctctggtgaatccgggcccggccatggccagccacaaagacgatgaagaaaagttttttcctcagagcggggttcttatctttgggaagcaaggctcagagaaaacaaatgtggatattgaaaaggtcatgattacagacgaagaggaaatcaggaccaccaatcccgtggctacggagcagtatggttctgtatctaccaacctccagagcggcaacacacaagcagctaccgcagatgtcaacacacaaggcgttcttccaggcatggtcgggcaagacagagacgtgtacctgcaggggcctacttgggcaaagattccacacacggacggacattttcacccctctcccctcatgggcggatttggacttaaacaccctcctccacagattctcatcaagaacaccccggtacctgcgaatccttcgaccaccttcagtgcggcaaagtttgcttccttcattacacagtactccacggggcaggtcagcgtggagatcgagtgggagctgcagaaggagaacagcaaacgctggaatcccgagatccagtacacttccaactacaacaagtctgttaatgtggactttactgtggacactaatggcgtgtattcagagcctcgccccattggcaccagatacctgactcgtaatctgtaa

SEQ ID NO: 232 - protein, 735 aa, Artificial Sequence
  Synthetic polypeptide
MAADGYLPDWLEDTLSEGIRQWWKLKPGPPPPKPAERHKDDSRGLVLPGYKYLGPFNGLDKGEPVNEADAAALEHDKAYDRQLDSGDNPYLKYNHADAEFQERLKEDTSFGGNLGRAVFQAKKRVLEPLSLVEEPVKTAPGKKRPVEHSPAEPDSSSGTGKSGNQPARKRLNFGQTGDSDSVPDPQPLGQPPAAPSGLGTNTMATGSGAPMADNNEGADGVGNSSGNWHCDSTWMGDRVITTSTRTWALPTYNNHLYKQISSQSGASNDNHYFGYSTPWGYFDFNRFHCHFSPRDWQRLINNNWGFRPKRLNFKLFNIQVKEVTQNDGTTTIANNLTSTVQVFTDSEYQLPYVLGSAHQGCLPPFPADVFMVPQYGYLTLNNGSQAVGRSSFYCLEYFPSQMLRTGNNFTFSYTFEDVPFHSSYAHSQSLDRLMNPLIDQYLYYLSRTNTPSGTTTQSRLQFSQAGASDIQDQSRNWLPGPCYRQQRVSKTSADNNNSEYSWTGATKYHLNGRDSLVNPGPAMASHKDDEEKFFPQSGVLIFGKQGSEKTNVDIEKVMITDEEEIRTTNPVATEQYGSVSTNLQSGNTQAATADVNTQGVLPGMVGQDRDVYLQGPTWAKIPHTDGHFHPSPLMGGFGLKHPPPQILIKNTPVPANPSTTFSAAKFASFITQYSTGQVSVEIEWELQKENSKRWNPEIQYTSNYNKSVNVDFTVDTNGVYSEPRPIGTRYLTRNL

SEQ ID NO: 233 - DNA, 2208 bp, Artificial Sequence
  Synthetic polynucleotide
atggctgccgatggttatcttccagattggctcgaggacactctctctgaaggaataagacagtggtggaagctcaaacctggcccaccaccaccaaagcccgcagagcggcataaggacgacagcaggggtcttgtgcttcctgggtacaagtacctcggacccttcaacggactcgacaagggagagccggtcaacgaggcagacgccgcggccctcgagcacgacaaggcctacgaccggcagctcgacagcggagacaacccgtacctcaagtacaaccacgccgacgcagagtttcaggagcgccttaaagaagatacgtcttttgggggcaacctcggacgagcagtcttccaggcaaaaaagagggttctggaacctctgggcctggttgaggagcctgttaagacggctccgggaaaaaagaggccggtagagcactctcctgcagagccagattcctcctccggaactggaaagtcgggcaaccagcctgcaagaaagagattgaatttcggtcagactggagactcagactccgtacctgacccccagcctctcggacagccaccagcagccccctctggtctgggaactaatacgatggctacaggcagtggcgcaccaatggcagacaataacgagggcgccgacggagtgggtaattcctcgggaaattggcattgcgattccacatggatgggcgacagagtcatcaccaccagcacccgaacctgggccctgcccacctacaacaaccatctgtacaagcaaatatccagccagtctggagccagcaacgacaatcactactttggctacagcaccccctgggggtattttgacttcaacagattccactgccacttttcaccacgtgactggcaaagactcatcaacaacaactggggattccgacccaagagactcaacttcaagctctttaacattcaagtcaaagaggtcacgcagaatgacggtacgacgacgattgccaataaccttaccagcacggttcaggtgtttactgactcggagtaccagctcccgtacgtcctcggctcggcgcatcaaggatgcctcccgccgttcccagcagacgtcttcatggtgccacagtatggatacctcaccctgaacaacgggagtcaggcagtaggacgctcttcattttactgcctagggtactttccttctcagatgctgcgtaccggaaacaactttaccttcagctacacctttgaggacgttcctttccacagcagctacgctcacagccagagtttggaccgtctcatgaatcctctcatcgaccagtacctgtattacttgagcagaacaaacactccaagcggaaccaccacgcagtccaggcttcagttttctcaggccggagcgagtgacattcgggaccagtctaggaactggcttcctggaccctgttaccgtcagcagcgagtatcaaagacatctgcggataacaacaacagtgaatactcgtggactggagctaccaagtaccacctcaatggcagagactctctggtgaatccgggcccggccatggccagccacaaagacgatgaagaaaagttttttcctcagagcggggttcttatctttgggaagcaaggcccagagaaaacaaatgtggatattgaaaaggtcatgattacagacgaagaggaaatcaggaccaccaatcccgtggctacggagcagtatggttctgtatctaccaacctccagagcggcaacacacaagcagctaccgcagatgtcaacacacaaggcgttcttccaggcatggtctggcaagacagagacgtgtacctgcaggggcctatttgggcaaagattccacacacggacggacattttcacccctctcccctcatgggcggatttggacttaaacaccctcctccacagattctcatcaagaacaccccggtacctgcgaatccttcgaccaccttcagtgcggcaaagtttgcttccttcattacacagtactccacggggcaggtcagcgtggagatcgagtgggagctgcagaaggagaacagcaaacgctggaatcccgagatccagtacacttccaactacaacaagtctgttaatgtggactttactgtggacactaatggcgtgtattcagagcctcgccccattggcaccagatacctgactcgtaatctgtaa

SEQ ID NO: 234 - protein, 735 aa, Artificial Sequence
  Synthetic polypeptide
MAADGYLPDWLEDTLSEGIRQWWKLKPGPPPPKPAERHKDDSRGLVLPGYKYLGPFNGLDKGEPVNEADAAALEHDKAYDRQLDSGDNPYLKYNHADAEFQERLKEDTSFGGNLGRAVFQAKKRVLEPLGLVEEPVKTAPGKKRPVEHSPAEPDSSSGTGKSGNQPARKRLNFGQTGDSDSVPDPQPLGQPPAAPSGLGTNTMATGSGAPMADNNEGADGVGNSSGNWHCDSTWMGDRVITTSTRTWALPTYNNHLYKQISSQSGASNDNHYFGYSTPWGYFDFNRFHCHFSPRDWQRLINNNWGFRPKRLNFKLFNIQVKEVTQNDGTTTIANNLTSTVQVFTDSEYQLPYVLGSAHQGCLPPFPADVFMVPQYGYLTLNNGSQAVGRSSFYCLGYFPSQMLRTGNNFTFSYTFEDVPFHSSYAHSQSLDRLMNPLIDQYLYYLSRTNTPSGTTTQSRLQFSQAGASDIRDQSRNWLPGPCYRQQRVSKTSADNNNSEYSWTGATKYHLNGRDSLVNPGPAMASHKDDEEKFFPQSGVLIFGKQGPEKTNVDIEKVMITDEEEIRTTNPVATEQYGSVSTNLQSGNTQAATADVNTQGVLPGMVWQDRDVYLQGPIWAKIPHTDGHFHPSPLMGGFGLKHPPPQILIKNTPVPANPSTTFSAAKFASFITQYSTGQVSVEIEWELQKENSKRWNPEIQYTSNYNKSVNVDFTVDTNGVYSEPRPIGTRYLTRNL

SEQ ID NO: 235 - protein, 735 aa, Artificial Sequence
  Synthetic polypeptide
MAADGYLPDWLEDTLSEGIRQWWKLKPGPPPPKPAERHKDDSRGLVLPGYKYLGPFNGLDKGEPVNEADAAALEHDKAYDRQLDSGDNPYLKYNHADAEFQERLKEDTSFGGNLGRAVFQAKKRVLEPLGLVEEPVKTAPGKKRPVEHSPAEPDSSSGTGKSGNQPARKRLNFGQTGDSDSVPDPQPLGQPPAAPSGLGTNTMATGSGAPMADNNEGADGVGNSSGNWHCDSTWMGDRVITTSTRTWALPTYNNHLYKQISSQSGASNDNHYFGYSTPWGYFDFNRFHCHFSPRDWQRLINNNWGFRPKRLNFKLFNIQVKEVTQNDGTTTIANNLTSTVQVFTDSEYQLPYVLGSAHQGCLPPFPADVFMVPQYGYLTLNNGSQAVGRSSFYCLEYFPSQMLRTGNNFTFSYTFEDVPFHSSYAHSQSLDRLMNPLIDQYLYYLSRTNTPSGTTTQSRLQFSQAGASDIRDQSRNWLPGPCYRQQRVSKTSADNNNSEYSWTGATKYHLNGRDSLVNPGPAMASHKDDEEKFFPQSGVLIFGKQGPEKTNVDIEKVMITDEEEIRTTNPVATEQYGSVSTNLQSGNTQAATADVNTQGVLPGMVWQDRDVYLQGPIWAKIPHTDGHFHPSPLMGGFGLKHPPPQILIKNTPVPANPSTTFSAAKFASFITQYSTGQVSVEIEWELQKENSKRWNPEIQYTSNYNKSVNVDFTVDTNGVYSEPRPIGTRYLTRNL

SEQ ID NO: 236 - protein, 735 aa, Artificial Sequence; identical to SEQ ID NO: 235
  Synthetic polypeptide

SEQ ID NO: 237 - DNA, 2211 bp, Artificial Sequence
  Synthetic polynucleotide
atggctgccgatggttatcttccagattggctcgaggacactctctctgaaggaataagacagtggtggaagctcaaacctggcccaccaccaccaaagcccgcagagcggcataaggacgacagcaggggtcttgtgcttcctgggtacaagtacctcggacccttcaacggactcgacaagggggagccggtcaacgaggcagacgccgcggccctcgagcacgacaaggcctacgaccggcagctcgacagcggagacaacccgtacctcaagtacaaccacgccgacgcagagtttcaggagcgccttaaagaagatacgtcttttgggggcaacctcggacgagcagtcttccaggcgaaaaagagggttcttgaacctctgcggcctggtttgaggaaacctgttaagacggctccgggaaaaaagaggccggtagagcactctcctgtggagccagactcctcctcgggaaccggaaaagcgggccagcagcctgcaagaaaaagattaaattttggtcagactggagacgcagactccgtacctgacccccagcctctcggacagccaccagcagccccctctggtctgggatctactacaatggctacaggcagtggcgcaccaatggcagacaataacgagggtgccgatggagtgggtaattcctcaggaaattggcattgcgattcccaatggctggacgacagagtcatcgccaccagcacccgaacctgggccctgcccacatacaacaaccacctctacaagcaaatctccagccaatcaggagcctgcaacgacaaccactactttggctacagcaccccctgggggtattttgacttcaacagattccactgccacttttcaccacgtgactggcaaagactcatcaacagcaactggggattccggcccaaaagactcaacttcaagctctttaatattcaagtcaaagaggtcacgcagaatgacggtacgacgacgattgccaataaccttaccagcacggttcaggtgtttactgactcggagtaccagctcccgtacgtcccgggctcggcgcatcaaggatgcctcccgccgtttccagcggacgtcttcatggtcccacagtatggatacctcaccctgaacaacgggagtcaggcggtaggacgctcttccttttactgcctggagtactttccttctcagatgctgcgtactggaaacaactttcagttcagctacacttttgaagacgtgcctttccacagcagctacgctcactgccagagtctggatcggctgatgaatcctctgatcgaccagtacctgtattatctgaacaagacacaaacaaatagtggaactcttcagcagtctcggctactgtttagccaagctggaccaaccaacatgtctcttcaagctaaaaactggctgcctggaccttgctacagacagcagcgtctgtcaaaacaggcaaacgacaataacaactgcaactttccctggactgcagctacaaagtatcatctaaatggccgggactcgttggttaatccaggaccagctatggccagtcacaaggatgacgaagaaaagtttttccccatgcatggaaccctgatatttggtaaacaaggaacaaatgccaacgacgcggatttggaaaatgtcatgattacagatgaagaagaaatcaggcccaccaatcccgtggctacggagcagtacgggactgtgtcaaataatttgcaaaactcaaacactggtccaactacaggaactgtcaatcaccaaggagcgttacctggtatggtgtggcaggatcgagacgtgtacctgcagggacccatttgggccaagattcctcacaccgatggacactttcatccttctccactgatgggaggttttggactcaaacacccgcctcctcagatcatgatcaaaagcactcccgttccagccaatcctcccacaaacttcagttctgccaagtttgcttcttccatcacacagtattccacgggacaggtcagcgtggagatcgagtgggagctgcagaaggagaacagcaaacgctggaatcccgaaattcagtacacttccaactacaacaagtctgttaatgtggactttactgtggacactaatggtgtgtattcagagcctcgccccattggcaccagatacctgactcgtaatctgtaa

SEQ ID NO: 238 - protein, 736 aa, Artificial Sequence
  Synthetic polypeptide
MAADGYLPDWLEDTLSEGIRQWWKLKPGPPPPKPAERHKDDSRGLVLPGYKYLGPFNGLDKGEPVNEADAAALEHDKAYDRQLDSGDNPYLKYNHADAEFQERLKEDTSFGGNLGRAVFQAKKRVLEPLRPGLRKPVKTAPGKKRPVEHSPVEPDSSSGTGKAGQQPARKRLNFGQTGDADSVPDPQPLGQPPAAPSGLGSTTMATGSGAPMADNNEGADGVGNSSGNWHCDSQWLDDRVIATSTRTWALPTYNNHLYKQISSQSGACNDNHYFGYSTPWGYFDFNRFHCHFSPRDWQRLINSNWGFRPKRLNFKLFNIQVKEVTQNDGTTTIANNLTSTVQVFTDSEYQLPYVPGSAHQGCLPPFPADVFMVPQYGYLTLNNGSQAVGRSSFYCLEYFPSQMLRTGNNFQFSYTFEDVPFHSSYAHCQSLDRLMNPLIDQYLYYLNKTQTNSGTLQQSRLLFSQAGPTNMSLQAKNWLPGPCYRQQRLSKQANDNNNCNFPWTAATKYHLNGRDSLVNPGPAMASHKDDEEKFFPMHGTLIFGKQGTNANDADLENVMITDEEEIRPTNPVATEQYGTVSNNLQNSNTGPTTGTVNHQGALPGMVWQDRDVYLQGPIWAKIPHTDGHFHPSPLMGGFGLKHPPPQIMIKSTPVPANPPTNFSSAKFASSITQYSTGQVSVEIEWELQKENSKRWNPEIQYTSNYNKSVNVDFTVDTNGVYSEPRPIGTRYLTRNL

SEQ ID NO: 239 - DNA, 2208 bp, Artificial Sequence
  Synthetic polynucleotide
atggctgccgatggttatcttccagattggctcgaggacactctctctgaaggaataagacagtggtggaagctcaaacctggcccaccaccaccaaagcccgcagagcggcataaggacgacagcaggggtcttgtgcttcctgggtacaagtacctcggacccttcaacggactcgacaagggagagccggtcaacgaggcagacgccgcggccctcgagcacgacaaggcctacgaccggcagctcgacagcggagacaacccgtacctcaagtacaaccacgccgacgcggagtttcaggagcgccttaaagaggatacgtcttttgggggcaacctcggacgagcagtcttccaggcaaaaaagagggttctggaacctctgggcctggttgaggagcctgttaagacggctccgggaaaaaagaggccggtagagcactctcctgcagagccagattcctcctccggaactggaaagtcgggcaaccagcctgcaagaaagagattgaatttcggtcagactggagactcagactccgtacctgacccccagcctctcggacagccaccagcagccccctctggtctgggaactaatacgatggctacaggcagtggcgcaccaatggcagacaataacgagggcgccgacggagtgggtaattcctcgggaaattggcattgcgattccacatggatgggcgacagagtcatcaccaccagcacccgaacctgggccctgcccacctacaacaaccatctgtacaagcaaatatccagccagtctggagccagcaacgacaatcactactttggctacagcaccccctgggggtattttgacttcaacagattccactgccacttttcaccacgtgactggcaaagactcatcaacaacaactggggattccgacccaagagactcaacttcaagctctttaacattcaagtcaaagaggtcacgcagaatgacggtacgacgacgattgccaataaccttaccagcacggttcaggtgtttactgactcggagtaccagctcccgtacgtcctcggctcggcgcatcaaggatgcctcccgccgttcccagcagacgtcttcatggtgccacagtatggatacctcaccctgaacaacgggagtcaggcagtaggacgctcttcattttactgcctagagtactttccttctcagatgctgcgtaccggaaacagctttaccttcagctacacctttgaggacgttcctttccacagcagctacgctcacagccagagtttggaccgtctcatgaatcctctcatcgaccagtacctgtattacttgagcagaacaaacactccaagcggaaccaccacgcagtccaggcttcagttttctcaggccggagcgagtgacattcgggaccagtctaggaactggcttcctggaccctgttaccgtcagcagcgagtatcaaagacatctgcggataacaacaacagtgaatactcgtggactggagctaccaagtaccacctcaatggcagagactctctggtgaatccgggcccggccatggccagccacaaagacgatgaagaaaagttctttcctcagagcggggttcttatctttgggaagcaaggctcagagaaaacaaatgtggatattgaaaaggtcatgattacagacgaagaggaaatcaggaccaccaatcccgtggctacggagcagtatggttctgtatctaccaacctccagagcggcaacacacaagcagctaccgcagatgtcaacacacaaggcgttcttccaggcatggtctggcaagacagagacgtgtacctgcaggggcctatttgggcaaagattccacacacggacggacattttcacccctctcccctcatgggcggatttggacttaaacaccctcctccacagattctcatcaagaacaccccggtacctgcgaatccttcgaccaccttcagtgcggcaaagtttgcttccttcattacacagtactccacggggcaggtcagcgtggagatcgagtgggagctgcagaaggagaacagcaaacgctggaatcccgagatccagtacacttccaactacaacaagtctgttaatgtggactttactgtggacactaatggcgtgtattcagagcctcgccccattggcaccagatacctgactcgtaatctgtaa

SEQ ID NO: 240 - protein, 735 aa, Artificial Sequence
  Synthetic polypeptide
MAADGYLPDWLEDTLSEGIRQWWKLKPGPPPPKPAERHKDDSRGLVLPGYKYLGPFNGLDKGEPVNEADAAALEHDKAYDRQLDSGDNPYLKYNHADAEFQERLKEDTSFGGNLGRAVFQAKKRVLEPLGLVEEPVKTAPGKKRPVEHSPAEPDSSSGTGKSGNQPARKRLNFGQTGDSDSVPDPQPLGQPPAAPSGLGTNTMATGSGAPMADNNEGADGVGNSSGNWHCDSTWMGDRVITTSTRTWALPTYNNHLYKQISSQSGASNDNHYFGYSTPWGYFDFNRFHCHFSPRDWQRLINNNWGFRPKRLNFKLFNIQVKEVTQNDGTTTIANNLTSTVQVFTDSEYQLPYVLGSAHQGCLPPFPADVFMVPQYGYLTLNNGSQAVGRSSFYCLEYFPSQMLRTGNSFTFSYTFEDVPFHSSYAHSQSLDRLMNPLIDQYLYYLSRTNTPSGTTTQSRLQFSQAGASDIRDQSRNWLPGPCYRQQRVSKTSADNNNSEYSWTGATKYHLNGRDSLVNPGPAMASHKDDEEKFFPQSGVLIFGKQGSEKTNVDIEKVMITDEEEIRTTNPVATEQYGSVSTNLQSGNTQAATADVNTQGVLPGMVWQDRDVYLQGPIWAKIPHTDGHFHPSPLMGGFGLKHPPPQILIKNTPVPANPSTTFSAAKFASFITQYSTGQVSVEIEWELQKENSKRWNPEIQYTSNYNKSVNVDFTVDTNGVYSEPRPIGTRYLTRNL

SEQ ID NO: 241 - DNA, 2211 bp, Artificial Sequence; identical to SEQ ID NO: 131
  Synthetic polynucleotide

SEQ ID NO: 242 - protein, 736 aa, Artificial Sequence
  Synthetic polypeptide
MAADGYLPDWLEDTLSEGIRQWWKLKPGPPPPKPAERHKDDSRGLVLPGYKYLGPGNGLDKGEPVNAADAAALEHDKAYDQQLKAGDNPYLKYNHADAEFQERLKEDTSFGGNLGRAVFQAKKRLLEPLGLVEEAAKTAPGKKRPVEQSPQEPDSSAGIGKSGSQPAKKKLNFGQTGDTESVPDPQPIGEPPAAPSGVGSLTMASGGGAPVADNNEGADGVGSSSGNWHCDSQWLGDRVITTSTRTWALPTYNNHLYKQISNSTSGGSSNDNAYFGYSTPWGYFDFNRFHCHFSPRDWQRLINNNWGFRPKRLNFKLFNIQVKEVTDNNGVKTIANNLTSTVQVFTDSDYQLPYVLGSAHEGCLPPFPADVFMIPQYGYLTLNDGGQAVGRSSFYCLEYFPSQMLRTGNNFQFSYEFENVPFHSSYAHSQSLDRLMNPLIDQYLYYLSKTINGSGQNQQTLKFSVAGPSNMAVQGRNYIPGPSYRQQRVSTTVTQNNNSEFAWPGASSWALNGRNSLMNPGPAMASHKEGEDRFFPLSGSLIFGKQGTGRDNVDADKVMITNEEEIKTTNPVATESYGQVATNHQSAQAQAQTGWVQNQGILPGMVWQDRDVYLQGPIWAKIPHTDGNFHPSPLMGGFGMKHPPPQILIKNTPVPADPPTAFNKDKLNSFITQYSTGQVSVEIEWELQKENSKRWNPEIQYTSNYYKSNNVEFAVSTEGVYSEPRPIGTRYLTRNL

SEQ ID NO: 243 - DNA, 2211 bp, Artificial Sequence
  Synthetic polynucleotide
atggctgccgatggttatcttccagattggctcgaggacactctctctgaaggaataagacagtggtggaagctcaaacctggcccaccaccaccaaagcccgcagagcggcataaggacgacagcaggggtcttgtgcttcctgggtacaagtacctcggacccggcaacggactcgacaagggggagccggtcaacgcagcagacgcggcggccctcgagcacgacaaggcctacgaccagcagctcaaggccggagacaacccgtacctcaagtacaaccacgccgacgccgagttccaggagcggctcaaagaagatacgtcttttgggggcaacctcgggcgagcagtcttccaggccaaaaagaggcttcttgaacctcttggtctggttgaggaagcggctaagacggctcctggaaagaagaggcctgtagagcagtctcctcaggaaccggactcctccgcgggtattggcaaatcgggttcacagcccgctaaaaagaaactcaatttcggtcagactggcgacacagagtcagtccccgaccctcaaccaatcggagaacctcccgcagccccctcaggtgtgggatctcttacaatggcttcaggtggtggcgcaccagtggcagacaataacgaaggtgccgatggagtgggtagttcctcgggaaattggcattgcgattcccaatggctgggggacagagtcatcaccaccagcacccgaacctgggccctgcccacctacaacaatcacctctacaagcaaatctccaacagcacatctggaggatcttcaaatgacaacgcctacttcggctacagcaccccctgggggtattttgacttcaacagattccactgccacttctcaccacgtgactggcagcgactcatcaacaacaactggggattccggcctaagcgactcaacttcaagctcttcaacattcaggtcaaagaggttacggacaacaatggagtcaagaccatcgccaataaccttaccagcacggtccaggtcttcacggactcagactatcagctcccgtacgtgctcgggtcggctcacgagggctgcctcccgccgttcccagcggacgttttcatgattcctcagtacgggtatctgacgcttaatgatgggagccaggccgtgggtcgttcgtccttttactgcctggaatatttcccgtcgcaaatgctaagaacgggtaacaacttccagttcagctacgagtttgagaacgtacctttccatagcagctacgctcacagccaaagcctggaccgactaatgaatccactcatcgaccaatacttgtactatctctcaaagactattaacggttctggacagaatcaacaaacgctaaaattcagcgtggccggacccagcaacatggctgtccagggaagaaactacatacctggacccagctaccgacaacaacgtgtctcaaccactgtgactcaaaacaacaacagcgaatttgcttggcctggagcttcttcttgggctctcaatggacgtaatagcttgatgaatcctggacctgctatggccagccacaaagaaggagaggaccgtttctttcctttgtctggatctttaatttttggcaaacaaggaactggaagagacaacgtggatgcggacaaagtcatgataaccaacgaagaagaaattaaaactactaacccggtagcaacggagtcctatggacaagtggccacaaaccaccagagtgcccaagcacaggcgcagaccggctgggttcaaaaccaaggaatacttccgggtatggtttggcaggacagagatgtgtacctgcaaggacccatttgggccaaaattcctcacacggacggcaactttcacccttctccgctaatgggagggtttggaatgaagcacccgcctcctcagatcctcatcaaaaacacacctgtacctgcggatcctccaacggctttcaataaggacaagctgaactctttcatcacccagtattctactggccaagtcagcgtggagattgagtgggagctgcagaaggaaaacagcaagcgctggaacccggagatccagtacacttccaactattacaagtctaataatgttgaatttgctgttaatactgaaggtgtatatagtgaaccccgccccattggcaccagatacctgactcgtaatctgtaa

SEQ ID NO: 244 - protein, 736 aa, Artificial Sequence
  Synthetic polypeptide
MAADGYLPDWLEDTLSEGIRQWWKLKPGPPPPKPAERHKDDSRGLVLPGYKYLGPGNGLDKGEPVNAADAAALEHDKAYDQQLKAGDNPYLKYNHADAEFQERLKEDTSFGGNLGRAVFQAKKRLLEPLGLVEEAAKTAPGKKRPVEQSPQEPDSSAGIGKSGSQPAKKKLNFGQTGDTESVPDPQPIGEPPAAPSGVGSLTMASGGGAPVADNNEGADGVGSSSGNWHCDSQWLGDRVITTSTRTWALPTYNNHLYKQISNSTSGGSSNDNAYFGYSTPWGYFDFNRFHCHFSPRDWQRLINNNWGFRPKRLNFKLFNIQVKEVTDNNGVKTIANNLTSTVQVFTDSDYQLPYVLGSAHEGCLPPFPADVFMIPQYGYLTLNDGSQAVGRSSFYCLEYFPSQMLRTGNNFQFSYEFENVPFHSSYAHSQSLDRLMNPLIDQYLYYLSKTINGSGQNQQTLKFSVAGPSNMAVQGRNYIPGPSYRQQRVSTTVTQNNNSEFAWPGASSWALNGRNSLMNPGPAMASHKEGEDRFFPLSGSLIFGKQGTGRDNVDADKVMITNEEEIKTTNPVATESYGQVATNHQSAQAQAQTGWVQNQGILPGMVWQDRDVYLQGPIWAKIPHTDGNFHPSPLMGGFGMKHPPPQILIKNTPVPADPPTAFNKDKLNSFITQYSTGQVSVEIEWELQKENSKRWNPEIQYTSNYYKSNNVEFAVNTEGVYSEPRPIGTRYLTRNL

SEQ ID NO: 245 - DNA, 2208 bp, Artificial Sequence
  Synthetic polynucleotide
atggctgccgatggttatcttccagattggctcgaggacactctctctgaaggaataagacagcggtggaagctcaaacctggcccaccaccaccagagcccgcagagcggcataaggacgacagcaggggtcttgtgcttcctgggtacaagtacctcggacccttcaacggactcgacaagggagagccggtcaacgaggcagacgccgcggccctcgagcacgacaaagcctacgaccggcagctcgacagcggagacaacccgtacctcaagtacaaccacgccgacgcggagtttcaggagcgccttaaagaagatacgtcttttgggggcaacctcggacgagcagtcttccaggcgaaaaagagggtacttgaacctctgggcctggttgaggaacctgttaagacggctccgggaaaaaagaggccggtagagcactctcctgtggagccagactcctcctcgggaaccggaaaggcgggccagcagcctgcaagaaaaagattgaattttggtcagactggagacgcagactcagtacctgacccccagcctctcggacagccaccagcagccccctctggtctgggaactaatacgatggctacaggcagtggcgcaccaatggcagacaataacgagggcgccgacggagtgggtaattcctcgggaaattggcattgcgattccacatggatgggcgacagagtcatcaccaccagcacccgaacctgggccctgcccacctacaacaaccacctctacaaacaaatttccagccaatcaggagcctcgaacgacaatcactactttggctacagcaccccttgggggtattttgacttcaacagattccactgccacttttcaccacgtgactggcaaagactcatcaacaacaactggggattccgacccaagagactcaacttcaagctctttaacattcaagtcaaagaggtcacgcagaatgacggtacgacgacgattgccaataaccttaccggcacggttcaggtgtttactgactcggagtaccagctcccgtacgtcctcggctcggcgcatcaaggatgcctcccgccgttcccagcagacgtcttcatggtgccacagtatggatacctcaccctgaacaacgggagtcaggcagtaggacgctcttcattttactgcctggagtactttccttctcagatgctgcgtaccggaaacaactttaccttcagctacacttttgaggacgttcctttccacagcagctacgctcacagccagagtctgggccgtctcatgaatcctctcatcgaccagtacctgtattacttgagcagaacaaacactccaagtggaaccaccacgcagtcaaggcttcagttttctcaggccggagcgagtgacattcgggaccagtctaggaactggcttcctggaccctgttaccgccagcagcgagtatcaaagacatctgcggataacaacaacagtgaatactcgtggactggagctaccaagtaccacctcaatggcagagactctctggtgaatccgggcccggccatggcaagccacaaggacgatgaagaaaagttttttcctcagagcggggttctcatctttgggaagcaaggctcagagaaaacaaatgtggacattgaaaaggtcatgattacagacgaagaggaaatcaggacaaccaatcccgtggctacggagcagtatggttctgtatctaccaacctccagagaggcaacagacaagcagctaccgcagatgtcaacacacaaggcgttcttccaggcatggtctggcaggacagagatgtgtaccttcaggggcccatctgggcaaagattccacacacggacggacattttcacccctctcccctcatgggtggattcggacttaaacaccctcctccacagattctcatcaagaacaccccggtacctgcgaatccttcgaccaccttcagtgcggcaaagtttgcttccttcatcacacagtactccacgggacaggtcagcgtggagatcgagtgggagctgcagaaggaaaacagcaaacgctggaatcccgaaattcagtacacttccaactacaacaagtctgttaatgtggactttactgtggacactaatggcgtgtattcagagcctcgccccattggcaccagatacctgactcgtaatctgtaa

SEQ ID NO: 246 - protein, 735 aa, Artificial Sequence
  Synthetic polypeptide
MAADGYLPDWLEDTLSEGIRQRWKLKPGPPPPEPAERHKDDSRGLVLPGYKYLGPFNGLDKGEPVNEADAAALEHDKAYDRQLDSGDNPYLKYNHADAEFQERLKEDTSFGGNLGRAVFQAKKRVLEPLGLVEEPVKTAPGKKRPVEHSPVEPDSSSGTGKAGQQPARKRLNFGQTGDADSVPDPQPLGQPPAAPSGLGTNTMATGSGAPMADNNEGADGVGNSSGNWHCDSTWMGDRVITTSTRTWALPTYNNHLYKQISSQSGASNDNHYFGYSTPWGYFDFNRFHCHFSPRDWQRLINNNWGFRPKRLNFKLFNIQVKEVTQNDGTTTIANNLTGTVQVFTDSEYQLPYVLGSAHQGCLPPFPADVFMVPQYGYLTLNNGSQAVGRSSFYCLEYFPSQMLRTGNNFTFSYTFEDVPFHSSYAHSQSLGRLMNPLIDQYLYYLSRTNTPSGTTTQSRLQFSQAGASDIRDQSRNWLPGPCYRQQRVSKTSADNNNSEYSWTGATKYHLNGRDSLVNPGPAMASHKDDEEKFFPQSGVLIFGKQGSEKTNVDIEKVMITDEEEIRTTNPVATEQYGSVSTNLQRGNRQAATADVNTQGVLPGMVWQDRDVYLQGPIWAKIPHTDGHFHPSPLMGGFGLKHPPPQILIKNTPVPANPSTTFSAAKFASFITQYSTGQVSVEIEWELQKENSKRWNPEIQYTSNYNKSVNVDFTVDTNGVYSEPRPIGTRYLTRNL

SEQ ID NO: 247 - DNA, 2208 bp, Artificial Sequence
  Synthetic polynucleotide
atggctgccgatggttatcttccagattggctcgaggacactctctctgaaggaataagacagcggtggaagctcaaacctggcccaccaccaccagagcccgcagagcggcataaggacgacagcaggggtcttgtgcttcctgggtacaagtacctcggacccttcaacggactcgacaagggagagccggtcaacgaggcagacgccgcggccctcgagcacgacaaagcctacgaccggcagctcgacagcggagacaacccgtacctcaagtacaaccacgccgacgcggagtttcaggagcgccttaaagaagatacgtcctttgggggcaacctcggacgagcagtcttccaggcgaaaaagagggtacttgaacctctgggcctggttgaggaacctgttaagacggctccgggaaaaaagaggccggtagagcactctcctgtggagccagactcctcctcgggaaccggaaaggcgggccagcagcctgcaagaaaaagattgaattttggtcagactggagacgcagactcagtacctgacccccagcctctcggacagccaccagcagccccctctggtctgggaactaatacgatggctacaggcagtggcgcaccaatggcagacaataacgagggcgccgacggagtgggtaattcctcgggaaattggcattgcgattccacatggatgggcgacagagtcatcaccaccagcacccgaacctgggccctgcccacctacaacaaccacctctacaaacaaatttccagccaatcaggagcctcgaacgacaatcactactttggctacagcaccccttgggggtattttgacttcaacagattccactgccacttttcaccacgtgactggcaaagactcatcaacaacaactggggattccgacccaagagactcaacttcaagctctttaacattcaagtcaaagaggtcacgcagaatgacggtacgacgacgattgccaataaccttaccagcacggttcaggtgtttactgactcggagtaccagctcccgtacgtcctcggctcggcgcatcaaggatgcctcccgccgttcccagcagacgtcttcatggtgccacagtatggatacctcaccctgaacaacgagagtcaggcagtaggacgctcttcattttactgcctggagtactttccttctcagatgctgcgtaccggaaacaactttaccttcagctacacttttgaggacgttcctttccacagcagctacgctcacagccagagtctgggccgtctcatgaatcctctcatcgaccagtacctgtattacttgagcagaacaaacactccaagtggaaccaccacgcagtcaaggcttcagttttctcaggccggagcgagtgacattcgggaccagtctaggaactggcttcctggaccctgttaccgccagcagcgagtatcaaagacatctgcggataacaacaacagtgaatactcgtggactggagctaccaagtaccacctcaatggcagagactctctggtgaatccgggcccggccatggcaagccacaaggacgatgaagaaaagttttttcctcagagcggggttctcatctttgggaagcaaggctcagagaaaacaaatgtggacattgaaaaggtcatgattacagacgaagaggaaatcaggacaaccaatcccgtggctacggagcagtatggttctgtatctaccaacctccagagaggcaacagacaagcagctaccgcagatgtcaacacacaaggcgttcttccaggcatggtctggcaggacagagatgtgtaccttcaggggcccatctgggcaaagattccacacacggacggacattttcacccctctcccctcatgggtggattcggacttaaacaccctcctccacagattctcatcaagaacaccccggtacctgcgaatccttcgaccaccttcagtgcggcaaagtttgcttccttcatcacacagtactccacgggacaggtcagcgtggagatcgagtgggagctgcagaaggaaaacagcaaacgctggaatcccgaaattcagtacacttccaactacaacaagtctgttaatgtggactttactgtggacactaatggcgtgtattcagagcctcgccccattggcaccagatacctgactcgtaatctgtaa

SEQ ID NO: 248 - protein, 735 aa, Artificial Sequence
  Synthetic polypeptide
MAADGYLPDWLEDTLSEGIRQRWKLKPGPPPPEPAERHKDDSRGLVLPGYKYLGPFNGLDKGEPVNEADAAALEHDKAYDRQLDSGDNPYLKYNHADAEFQERLKEDTSFGGNLGRAVFQAKKRVLEPLGLVEEPVKTAPGKKRPVEHSPVEPDSSSGTGKAGQQPARKRLNFGQTGDADSVPDPQPLGQPPAAPSGLGTNTMATGSGAPMADNNEGADGVGNSSGNWHCDSTWMGDRVITTSTRTWALPTYNNHLYKQISSQSGASNDNHYFGYSTPWGYFDFNRFHCHFSPRDWQRLINNNWGFRPKRLNFKLFNIQVKEVTQNDGTTTIANNLTSTVQVFTDSEYQLPYVLGSAHQGCLPPFPADVFMVPQYGYLTLNNESQAVGRSSFYCLEYFPSQMLRTGNNFTFSYTFEDVPFHSSYAHSQSLGRLMNPLIDQYLYYLSRTNTPSGTTTQSRLQFSQAGASDIRDQSRNWLPGPCYRQQRVSKTSADNNNSEYSWTGATKYHLNGRDSLVNPGPAMASHKDDEEKFFPQSGVLIFGKQGSEKTNVDIEKVMITDEEEIRTTNPVATEQYGSVSTNLQRGNRQAATADVNTQGVLPGMVWQDRDVYLQGPIWAKIPHTDGHFHPSPLMGGFGLKHPPPQILIKNTPVPANPSTTFSAAKFASFITQYSTGQVSVEIEWELQKENSKRWNPEIQYTSNYNKSVNVDFTVDTNGVYSEPRPIGTRYLTRNL

SEQ ID NO: 249 - DNA, 2208 bp, Artificial Sequence
  Synthetic polynucleotide
atggctgccgatggttatcttccagattggctcgaggacactctctctgaaggaataagacagcggtggaagctcaaacctggcccaccaccaccagagcccgcagagcggcataaggacgacagcaggggtcttgtgcttcctgggtacaagtacctcggacccttcaacggactcgacaagggagagccggtcaacgaggcagacgccgcggccctcgagcacgacaaagcctacgaccggcagctcgacagcggagacaacccgtacctcaagtacaaccacgccgacgcggagtttcaggagcgccttaaagaagatacgtcttttgggggcaacctcggacgagcagtcttccaggcgaaaaagagggtacttgaacctctgggcctggttgaggaacctgttaagacggctccgggaaaaaagaggccggtagagcactctcctgtggagccagactcctcctcgggaaccggaaaggcgggccagcagcctgcaagaaaaagattgaattttggtcagactggagacgcagactcagtacctgacccccagcctctcggacagccaccagcagccccctctggtctgggaactaatacgatggctacaggcagtggcgcaccaatggcagacaataacgagggcgccgacggagtgggtaattcctcgggaaattggcattgcgattccacatggatgggcgacagagtcatcaccaccagcacccgaacctgggccctgcccacctacaacaaccacctctacaaacaaatttccagccaatcaggagcctcgaacgacaatcactactttggctacagcaccccttgggggtattttgacttcaacagattccactgccacttttcaccacgtgactggcaaagactcatcaacaacaactggggattccgacccaagagactcaacttcaagctctttaacattcaagtcaaagaggtcacgcagaatgacggtacgacgacgattgccaataaccttaccagcacggttcaggtgtttactgactcggagtaccagctcccgtacgtcctcggctcggcgcatcaaggatgcctcccgccgttcccagcagacgtcttcatggtaccacagtatggatacctcaccctgaacaacgggagtcaggcagtaggacgctcttcattttactgcctggagtactttccttctcagatgctgcgtaccggaaacaactttaccttcagctacacttttgaggacgttcctttccacagcagctacgctcacagccagagtctgggccgtctcatgaatcctctcatcgaccagtacctgtattacttgagcagaacaaacactccaagtggaaccaccacgcagtcaaggcttcagttttctcaggccggagcgagtgacattcgggaccagtctaggaactggcttcctggaccctgttaccgccagcagcgagtatcaaagacatctgcggataacaacaacagtgaatactcgtggactggagctaccaagtaccacctcaatggcagagactctctggtgaatccgggcccggccatggcaagccacaaggacgatgaagaaaagttttttcctcagagcggggttctcatctttgggaagcaaggctcagagaaaacaaatgtggacattgaaaaggtcatgattacagacgaagaggaaatcaggacaaccaatcccgtggctacggagcagtatggttctgtatctaccaacctccagagaggcaacagacaagcagctaccgcagatgtcaacacacaaggcgttcttccaggcatggtctggcaggacagagatgtgtaccttcaggggcccatctgggcaaagattccacacacggacggacattttcacccctctcccctcatgggtggattcggacttaaacaccctcctccacagattctcatcaagaacaccccggtacctgcgaatccttcgaccaccttcagtgcggcaaagtttgcttccttcatcacacagtactccacgggacaggtcagcgtggagatcgagtgggagctgcagaaggaaaacagcaaacgctggaatcccgaaattcagtacacttccaactacaacaagtctgttaatgtggactttactgtggacactaatggcgtgtattcagagcctcgccccattggcaccagatacctgactcgtaatctgtaa

SEQ ID NO: 250 - protein, 735 aa, Artificial Sequence
  Synthetic polypeptide
MAADGYLPDWLEDTLSEGIRQRWKLKPGPPPPEPAERHKDDSRGLVLPGYKYLGPFNGLDKGEPVNEADAAALEHDKAYDRQLDSGDNPYLKYNHADAEFQERLKEDTSFGGNLGRAVFQAKKRVLEPLGLVEEPVKTAPGKKRPVEHSPVEPDSSSGTGKAGQQPARKRLNFGQTGDADSVPDPQPLGQPPAAPSGLGTNTMATGSGAPMADNNEGADGVGNSSGNWHCDSTWMGDRVITTSTRTWALPTYNNHLYKQISSQSGASNDNHYFGYSTPWGYFDFNRFHCHFSPRDWQRLINNNWGFRPKRLNFKLFNIQVKEVTQNDGTTTIANNLTSTVQVFTDSEYQLPYVLGSAHQGCLPPFPADVFMVPQYGYLTLNNGSQAVGRSSFYCLEYFPSQMLRTGNNFTFSYTFEDVPFHSSYAHSQSLGRLMNPLIDQYLYYLSRTNTPSGTTTQSRLQFSQAGASDIRDQSRNWLPGPCYRQQRVSKTSADNNNSEYSWTGATKYHLNGRDSLVNPGPAMASHKDDEEKFFPQSGVLIFGKQGSEKTNVDIEKVMITDEEEIRTTNPVATEQYGSVSTNLQRGNRQAATADVNTQGVLPGMVWQDRDVYLQGPIWAKIPHTDGHFHPSPLMGGFGLKHPPPQILIKNTPVPANPSTTFSAAKFASFITQYSTGQVSVEIEWELQKENSKRWNPEIQYTSNYNKSVNVDFTVDTNGVYSEPRPIGTRYLTRNL

SEQ ID NO: 251 - DNA, 2208 bp, Artificial Sequence
  Synthetic polynucleotide
atggctgccgatggttatcttccagattggctcgaggacactctctctgaaggaataagacagcggtggaagctcaaacctggcccaccaccaccagagcccgcagagcggcataaggacgacagcaggggtcttgtgcttcctgggtacaagtacctcggacccttcaacggactcgacaagggagagccggtcaacgaggcagacgccgcggccctcgagcacgacaaagcctacgaccggcagctcgacagcggagacaacccgtacctcaagtacaaccacgccgacgcggagtttcaggagcgccttaaagaagatacgtcttttgggggcaacctcggacgagcagtcttccaggcgaaaaagagggtactcgaacctctgggcctggttgaggaacctgttaagacggctccgggaaaaaagaggccggtagagcactctcctgtggagccagactcctcctcgggaaccggaaaggcgggccagcagcctgcaagaaaaagattgaattttggtcagactggagacgcagactcagtacctgacccccagcctctcggacagccaccagcagccccctctggtctgggaactaatacgatggctacaggcagtggcgcaccaatggcagacaataacgagggcgccgacggagtgggtaattcctcgggaaattggcattgcgattccacatggatgggcgacagagtcatcaccaccagcacccgaacctgggccctgcccacctacaacaaccacctctacaaacaaatttccagccaatcaggagcctcgaacgacaatcactactttggctacagcaccccttgggggtattttgacttcaacagattccactgccacttttcaccacgtgactggcaaagactcatcaacaacaactggggattccgacccaagagactcaacttcaagctctttaacattcaagtcaaagaggtcacgcagaatgacggtacgacgacgattgccaataaccttaccagcacggttcaggtgtttactgactcggagtaccagctcccgtacgtcctcggctcggcgcatcaaggatgcctcccgccgttcccagcagacgtcttcatggtgccacagtatggatacctcaccctgaacaacgggagtcaggcagcaggacgctcttcattttactgcctggagtactttccttctcagatgctgcgtaccggaaacaactttaccttcagctacacttttgaggacgttcctttccacagcagctacgctcacagccagagtctgggccgtctcatgaatcctctcatcgaccagtacctgtattacttgagcagaacaaacactccaagtggaaccaccacgcagtcaaggcttcagttttctcaggccggagcgagtgacattcgggaccagtctaggaactggcttcctggaccctgttaccgccagcagcgagtatcaaagacatctgcggataacaacaacagtgaatactcgtggactggagctaccaagtaccacctcaatggcagagactctctggtgaatccgggcccggccatggcaagccacaaggacgatgaagaaaagttttttcctcagagcggggttctcatctttgggaagcaaggctcagagaaaacaaatgtggacattgaaaaggtcatgattacagacgaagaggaaatcaggacaaccaatcccgtggctacggagcagtatggttctgtatctaccaacctccagagaggcaacagacaagcagctaccgcagatgtcaacacacaaggcgttcttccaggcatggtctggcaggacagagatgtgtaccttcaggggcccatctgggcaaagattccacacacggacggacattttcacccctctcccctcatgggtggattcggacttaaacaccctcctccacagattctcatcaagaacaccccggtacctgcgaatccttcgaccaccttcagtgcggcaaagtttgcttccttcatcacacagtactccacgggacaggtcagcgtggagatcgagtgggagctgcagaaggaaaacagcaaacgctggaatcccgaaattcagtacacttccaactacaacaagtccgttaatgtggactttactgtggacactaatggcgtgtattcagagcctcgccccattggcaccagatacctgactcgtaatctgtaa

SEQ ID NO: 252 - protein, 735 aa, Artificial Sequence
  Synthetic polypeptide
MAADGYLPDWLEDTLSEGIRQRWKLKPGPPPPEPAERHKDDSRGLVLPGYKYLGPFNGLDKGEPVNEADAAALEHDKAYDRQLDSGDNPYLKYNHADAEFQERLKEDTSFGGNLGRAVFQAKKRVLEPLGLVEEPVKTAPGKKRPVEHSPVEPDSSSGTGKAGQQPARKRLNFGQTGDADSVPDPQPLGQPPAAPSGLGTNTMATGSGAPMADNNEGADGVGNSSGNWHCDSTWMGDRVITTSTRTWALPTYNNHLYKQISSQSGASNDNHYFGYSTPWGYFDFNRFHCHFSPRDWQRLINNNWGFRPKRLNFKLFNIQVKEVTQNDGTTTIANNLTSTVQVFTDSEYQLPYVLGSAHQGCLPPFPADVFMVPQYGYLTLNNGSQAAGRSSFYCLEYFPSQMLRTGNNFTFSYTFEDVPFHSSYAHSQSLGRLMNPLIDQYLYYLSRTNTPSGTTTQSRLQFSQAGASDIRDQSRNWLPGPCYRQQRVSKTSADNNNSEYSWTGATKYHLNGRDSLVNPGPAMASHKDDEEKFFPQSGVLIFGKQGSEKTNVDIEKVMITDEEEIRTTNPVATEQYGSVSTNLQRGNRQAATADVNTQGVLPGMVWQDRDVYLQGPIWAKIPHTDGHFHPSPLMGGFGLKHPPPQILIKNTPVPANPSTTFSAAKFASFITQYSTGQVSVEIEWELQKENSKRWNPEIQYTSNYNKSVNVDFTVDTNGVYSEPRPIGTRYLTRNL

SEQ ID NO: 253 - protein, 738 aa, Artificial Sequence; identical to SEQ ID NO: 95
  Synthetic polypeptide

SEQ ID NO: 254 - DNA, 2217 bp, Artificial Sequence
  Synthetic polynucleotide
atggctgctgacggttatcttccagattggctcgaggacaacctctctgagggcattcgcgagtggtgggacctgaaacctggagcccccaagcccaaggccaaccagcagaagcaggacgacggccggggtctggtgcttcctggctacaagtacctcggacccttcaacggactcgacaagggggagcccgtcaacgcggcggacgcagcggccctcgagcacgacaaggcctacgaccagcagctcaaagcgggtgacaatccgtacctgcggtataaccacgccgacgccgagtttcaggagcgtctgcaagaagatacgtcttttgggggcaacctcgggcgagcagtcttccaggccaagaagcgggttctcgaacctctcggtctggttgaggaagctgctaagacggctcctggaaagaagagaccggtagaaccgtcacctcagcgttcccccgactcctccacgggcatcggcaagaaaggccagcagcccgctaaaaagagactgaactttggtcagactggcgactcagagtcagtccccgaccctcaaccaatcggagaaccaccagcaggcccctctggtctgggatctggtacaatggctgcaggcggtggcgctccaatggcagacaataacgaaggcgccgacggagtgggtagttcctcaggaaattggcattgcgattccacatggctgggcgacagagtcatcaccaccagcacccgaacctgggccctgcccacctacaacaaccacctctacaagcaaatatccaatgggacatcgggaggaagcaccaacgacaacacctacttcggctacagcaccccctgggggtattttgacttcaacagattccactgccacttctcaccacgtgactggcagcgactcatcaacaacaactggggattccggccaaaaagactcagcttcaagctcttcaacatccaggtcaaggaggtcacgcagaatgaaggcaccaagaccatcgccaataaccttaccagcacgattcaggtatttacggactcggaataccagctgccgtacgtcctcggctccgcgcaccagggctgcctgcctccgttcccggcggacgtcttcatgattccccagtacggctaccttacactgaacaatggaagtcaagccgtaggccgttcctccttctactgcctggaatattttccatctcaaatgctgcgaactggaaacaattttgaattcagctacaccttcgaggacgtgcctttccacagcagctacgcacacagccagagcttggaccgactgatgaatcctctcatcgaccagtacctgtactacttatccagaactcagtccacaggaggaactcaaggtacccagcaattgttattttctcaagctgggcctgcaaacatgtcggctcaggctaagaactggctacctggaccttgctaccggcagcagcgagtctctacgacactgtcgcaaaacaacaacagcaactttgcttggactggtgccaccaaatatcacctgaacggaagagactctttggtaaatcccggtgtcgccatggcaacccacaaggacgacgaggaacgcttcttcccgtcgagtggagtcctgatgttcggaaaacagggtgctggaagagacaatgtggactacagcagcgttatgctaaccagcgaagaagaaattaaaaccactaaccccgtagccacagaacaatacggtgtggtggctgacaacttgcagcaaaccaatacagggcctattgtgggaaatgtcaacagccaaggagccttacctggcatggtctggcagaaccgagacgtgtacctgcagggtcccatctgggccaagattcctcacacggacggcaacttccacccttcaccgctaatgggaggatttggactgaagcacccacctcctcagatcctgatcaagaacacgccggtacctgcggatcctccaacaacgttcagccaggcgaaattggcttccttcattacgcagtacagcaccggacaggtcagcgtggaaatcgagtgggagctgcagaaggagaacagcaaacgctggaacccagagattcagtacacttcaaactactacaaatctacaaatgtggactttgctgtcaatacagagggaacttattctgagcctcgccccattggtactcgttacctcacccgtaatctgtaa

SEQ ID NO: 255 - protein, 738 aa, Artificial Sequence
  Synthetic polypeptide
MAADGYLPDWLEDNLSEGIREWWDLKPGAPKPKANQQKQDDGRGLVLPGYKYLGPFNGLDKGEPVNAADAAALEHDKAYDQQLKAGDNPYLRYNHADAEFQERLQEDTSFGGNLGRAVFQAKKRVLEPLGLVEEAAKTAPGKKRPVEPSPQRSPDSSTGIGKKGQQPAKKRLNFGQTGDSESVPDPQPIGEPPAGPSGLGSGTMAAGGGAPMADNNEGADGVGSSSGNWHCDSTWLGDRVITTSTRTWALPTYNNHLYKQISNGTSGGSTNDNTYFGYSTPWGYFDFNRFHCHFSPRDWQRLINNNWGFRPKRLSFKLFNIQVKEVTQNEGTKTIANNLTSTIQVFTDSEYQLPYVLGSAHQGCLPPFPADVFMIPQYGYLTLNNGSQAVGRSSFYCLEYFPSQMLRTGNNFEFSYTFEDVPFHSSYAHSQSLDRLMNPLIDQYLYYLSRTQSTGGTQGTQQLLFSQAGPANMSAQAKNWLPGPCYRQQRVSTTLSQNNNSNFAWTGATKYHLNGRDSLVNPGVAMATHKDDEERFFPSSGVLMFGKQGAGRDNVDYSSVMLTSEEEIKTTNPVATEQYGVVADNLQQTNTGPIVGNVNSQGALPGMVWQNRDVYLQGPIWAKIPHTDGNCHPSPLMGGFGLKHPPPQILIKNTPVPADPPTTFSQAKLASFITQYSTGQVSVEIEWELQKENSKRWNPEIQYTSNYYKSTNVDFAVNTEGTYSEPRPIGTRYLTRNL

SEQ ID NO: 256 - protein, 738 aa, Artificial Sequence
  Synthetic polypeptide
MAADGYLPDWLEDNLSEGIREWWDLKPGAPKPKANQQKQDDGRGLVLPGYKYLGPFNGLDKGEPVNAADAAALEHDKAYDQQLKAGDNPYLRYNHADAEFQERLQEDTSFGGNLGRAVFQAKKRVLEPLGLVEEGAKTAPGKKRPVEPSPQRSPDSSTGIGKKGQQPARKRLNFGRTGDSESVPDPQPIGEPPAAPSSVGSGTMAAGGGAPMADNNEGADGVGSSSGNWHCDSTWLGDRVITTSTRTWALPTYNNHLYKQISNGTSGGSTNDNTYFGYSTPWGYLDFNRFHCHFSPRDWQRLINNNWGFRPKRLSFKLFNIQVKEVTQNEGTKTIANNLASTIQVFTDSEYQPPYVLGSAHQGCLPPFPADVFMIPQYGYLTLNNGSQAVGRSSFYCLEYFPSQMLRTGNNFSFSYTFEDVPFHSSYAHSQSLDRLMNPLIDQYLYYLSRTQSTGGTAGTQQLLFSRAGPSNMSAQARNWLPGPCYRQQRVSTTLSQNNNSNFAWTGATKYHLNGRDSLVNPGVAMATNKDDEDRFFPSSGILMFGKQGAGKDNVDYSNVMLTSEEEIKTTNPVATEQYGVVADNLQQQNTAPTVGAVNSQGALPGMVWQNRDVYLQGPIWAKIPHTDGNFHPSPLMGGFGLKHPPPQILIKNTPVPADPPTAFNQAKLNSFIAQYSTGQVSVEIEWELQKENSKRWNPEIQYTSNYYKSTNADFAVNTEGVYSEPRPIGTRYLTRNL

SEQ ID NO: 257 - DNA, 2217 bp, Artificial Sequence
  Synthetic polynucleotide
atggctgccgatggttatcttccagattggctcgaggacaacctctctgagggcattcgcgagtggtgggacctgaaacctggagccccgaaacccaaagccaaccagcaaaagcaggacgacggccggggtctggtgcttcctggctacaagtacctcggacccttcaacggactcgacaagggggagcccgtcaacgcggcggacgcagcggccctcgagcacgacaaggcctacgaccagcagctcaaagcgggtgacaatccgtacctgcggtataatcacgccgacgccgagtttcaggagcgtctgcaagaagatacgtcttttgggggcaacctcgggcgagcagtcttccaggccaagaagcgggttctcgaacctctcggtctggttgaggaaggcgctaagacggctcctggaaagaagagaccggtagagccgtcaccacagcgttcccccgactcctccacgggcatcggcaagaaaggccagcagcccgccagaaagagactcaatttcggtcggactggcgactcagagtcagtccccgaccctcaacctatcggagaacctccagcagcgccctctagtgtgggatctggtacaatggctgcaggcggtggcgcaccaatggcagacaataacgaaggtgccgacggagtgggtagttcctcgggaaattggcattgcgattccacatggctgggcgacagagttatcaccaccagcacccgaacctgggccctgcccacctacaacaaccacctctacaagcaaatctccaacgggacctcgggaggcagcaccaacgacaacacctactttggctacagcaccccctgggggtatcttgactttaacagattccactgccacttctcaccacgtgactggcagcgactcatcaacaacaactggggattccggcccaagagactcagcttcaagctcttcaacatccaggtcaaagaggtcacgcagaatgaaggcaccaagaccatcgccaataacctcgccagcaccatccaggtgtttacggactcggaataccagccgccgtacgtcctcggctctgcccaccagggctgcctgcctccgttcccggcggacgtcttcatgattcctcagtacggctacctgactctcaacaacggtagtcaggccgtgggacgttcctccttctactgcctggagtacttcccctctcagatgctgagaacgggcaacaacttttccttcagctacactttcgaggacgtgcctttccacagcagctacgcgcacagccagagtttggacaggctgatgaatcctctcatcgaccagtacctgtactacctgtcaagaacccagtctacgggaggcacagcgggaacccagcagttgctgttttctcgggccgggcctagcaacatgtcggctcaggccagaaactggctgcctggaccctgctacagacagcagcgcgtctccacgacactgtcgcaaaacaacaacagcaactttgcctggactggtgccaccaagtatcatctgaacggcagagactctctggtgaatccgggcgtcgccatggcaaccaacaaggacgacgaggaccgcttcttcccatccagcggcatcctcatgtttggcaagcagggagctggaaaagacaacgtggactatagcaacgtgatgctaaccagcgaggaagaaatcaagaccaccaaccccgtggccacagaacagtatggcgtggtggctgataacctacagcagcaaaacaccgctcctactgtgggggccgtcaacagccagggagccttacctggcatggtctggcagaaccgggacgtgtacctgcagggtcctatttgggccaagattcctcacacagatggcaactttcacccgtctcctttaatgggcggctttggacttaaacatccgcctcctcagatcctcatcaaaaacactcctgttcctgcggatcctccaacagcgttcaaccaggccaagctgaattctttcatcgcgcagtacagcaccggacaagtcagcgtggagatcgagtgggagctgcagaaggagaacagcaagcgctggaacccagagattcagtatacttccaactactacaaatctacaaatgcggactttgctgttaatactgagggtgtttactctgagcctcgccccattggcactcgttacctcacccgtaatctgtaa

SEQ ID NO: 258 - DNA, 2208 bp, Artificial Sequence
  Synthetic polynucleotide
atggctgccgatggttatcttccagattggctcgaggacactctctctgaaggaataagacagtggtggaagctcaaacctggcccaccaccaccaaagcccgcagagcggcataaggacgacagcaggggtcttgtgcttcctgggtacaagtacctcggacccttcaacggactcgacaagggggagccggtcaacgaggcagacgccgcggccctcgagcacgacaaggcctacgaccggcagctcgacagcggagacaacccgtacctcaagtacaaccacgccgacgcagagtttcaggagcgccttaaagaagatacgtcttttgggggcaacctcggacgagcagtcttccaggcgaaaaagagggttcttgaacctctgggcctggttgaggagcctgttaagacggctccgggaaaaaagaggccggtagagcactctcctgtggagccagactcctcctcgggaaccggaaaagcgggccagcagcctgcaagaaaaagattaaattttggtcagactggagacgcagactccgtacctgacccccagcctctcggacagccaccagcagccccctctggtctgggatctactacaatggctacaggcagtggcgcaccaatggcagacaataacgagggtgccgatggagtgggtaattcctcaggaaattggcattgcgattcccaatggctgggcgacagagtcatcaccaccagcacccgaacctgggccctgcccacatacaacaaccacctctacaagcaaatctccagccaatcaggagccagcaacgacaaccactactttggctacagcaccccctgggggtattttgacttcaacagattccactgccacttttcaccacgtgactggcaaagactcgtcaacaacaaccggggattccggcccaaaagactcaacttcaagctctttaatattcaagtcaaagaggtcacgcagaatgacggtacgacgacgattgccaataaccttaccagcacggttcaggtgtttactgactcggagtaccagctcccgtacgtcctgggctcggcgcatcaaggatgcctcccgccgtttccagcggacgtcttcatggtcccacagtatggatacctcaccctgaacaacgggagtcaggcggtaggacgctcttccttttactgcctggagtactttccttctcagatgctgcgtactggaaacaactttcagttcagctacacttttgaagacgtgcctttccacagcagctacgctcacagccagagtctggatcggctgatgaatcctctgatcgaccagtacctgtattatctgaacaagacacaaacaaatagtggaactcttcagcagtctcggctactgtttagccaagctggaccaaccaacatgtctcttcaagctaaaaactggctgcctggaccttgctacagacagcagcgtctgtcaaaacaggcaaacgacaacaacaacagcaactttccctggactgcagctacaaagtatcatctaaatggccgggactcgttggttaatccaggaccagctatggccagtcacaaggatgacgaagaaaagtttttccccatgcatggaaccctgatatttggtaaacaaggaacaaatgccaacgacgcggatttggaaaatgtcatgattacagatgaagaagaaatcagggccaccaatcccgtggctacggagcagtacgggactgtgtcaaataatttgcaaaactcaaacactggtccaactactggaactgtcaatcaccaaggagcgttacctggtatggtgtggcaggatcgagacgtgtacctgcagggacccatttgggccaagattcctcacaccgatggacactttcatccttctccactgatgggaggttttggactcaaacacccgcctcctcagatcatgatcaaaaacactcccgttccagccaatcctcccacaaacttcagttctgccaagtttgcttctttcatcacacagtattccacgggacaggtcagcgtggagatcgagtgggagctgcagaaggagaacagcaaacgctggaatcccgaaattcagtacacttccaactacaacaagtctgttaatgtggactttactgtggacactaatggtgtgtattcagagcctcgccccattggcaccagatacctgactcgtaatctgtaa

SEQ ID NO: 259 - protein, 735 aa, Artificial Sequence
  Synthetic polypeptide
MAADGYLPDWLEDTLSEGIRQWWKLKPGPPPPKPAERHKDDSRGLVLPGYKYLGPFNGLDKGEPVNEADAAALEHDKAYDRQLDSGDNPYLKYNHADAEFQERLKEDTSFGGNLGRAVFQAKKRVLEPLGLVEEPVKTAPGKKRPVEHSPVEPDSSSGTGKAGQQPARKRLNFGQTGDADSVPDPQPLGQPPAAPSGLGSTTMATGSGAPMADNNEGADGVGNSSGNWHCDSQWLGDRVITTSTRTWALPTYNNHLYKQISSQSGASNDNHYFGYSTPWGYFDFNRFHCHFSPRDWQRLVNNNRGFRPKRLNFKLFNIQVKEVTQNDGTTTIANNLTSTVQVFTDSEYQLPYVLGSAHQGCLPPFPADVFMVPQYGYLTLNNGSQAVGRSSFYCLEYFPSQMLRTGNNFQFSYTFEDVPFHSSYAHSQSLDRLMNPLIDQYLYYLNKTQTNSGTLQQSRLLFSQAGPTNMSLQAKNWLPGPCYRQQRLSKQANDNNNSNFPWTAATKYHLNGRDSLVNPGPAMASHKDDEEKFFPMHGTLIFGKQGTNANDADLENVMITDEEEIRATNPVATEQYGTVSNNLQNSNTGPTTGTVNHQGALPGMVWQDRDVYLQGPIWAKIPHTDGHFHPSPLMGGFGLKHPPPQIMIKNTPVPANPPTNFSSAKFASFITQYSTGQVSVEIEWELQKENSKRWNPEIQYTSNYNKSVNVDFTVDTNGVYSEPRPIGTRYLTRNL

SEQ ID NO: 260 - protein, 738 aa, Artificial Sequence
  Synthetic polypeptide
MAADGYLPDWLEDNLSEGIREWWDLKPGAPKPKANQQKQDDGRGLVLPGYKYLGPFNGLDKGEPVNAADAAALEHDKAYDQQLKAGDNPYLRYNHADAEFQERLQEDTSFGGNLGRAVFQAKKRVLEPLGLVEEAAKTAPGKKRPVEPSPQRSPDSSTGIGKKGQQPAKKRLSFGQTGDSESVPDPQPIGEPPAGPSGLGSGTMAAGGGAPMADNNEGADGVGSSSGNWHCDSTWLGDRVITTSTRTWALPTYNNHLYKQISNGTSGGSTNDNTYFGYSTPWGYFDFNRFHCHFSPRDWQRLINNNWGFRPKRLSFKLFNIQVKEVTQNEGTKTIANNLTSTIQVFTDSEYQLPYVLGSAHQGCLPPFPADVFMIPQYGYLTLNNGSQAVGRSSFYCLEYFPSQMLRTGNNSEFSYTFEDVPFHSSYAHSQSLDRLMNPLIDQYLYYLSRTQSTGGTQGTQQLLFSQAGPANMSAQAKNWLPGPCYRQQRVSTTLSQNNNSNFAWTGATKYHLNGRDSLVNPGVAMATHKDDEERFFPSSGVLMFGKQGAGRDNVDYSSVMLTSEEEIKTTNPVATEQYGVVADNLQQTNTGPIVGNVNSQGALPGMVWQNRDVYLQGPIWAKIPHTDGNFHPSPLMGGFGLKHPPPQILIKNTPVPADPPTTFSQAKLASFITQYSTGQVSVEIEWELQKENSKRWNPEIQYTSNYYKSTNVDFAVNTEGTYSEPRPIGTRYLTRNL

SEQ ID NO: 261 - DNA, 2217 bp, Artificial Sequence
  Synthetic polynucleotide
atggctgctgacggttatcttccagattggctcgaggacaacctctctgagggcattcgcgagtggtgggacctgaaacctggagcccccaagcccaaggccaaccagcagaagcaggacgacggccggggtctggtgcttcctggctacaagtacctcggacccttcaacggactcgacaagggggagcccgtcaacgcggcggacgcagcggccctcgagcacgacaaggcctacgaccagcagctcaaagcgggtgacaatccgtacctgcggtataaccacgccgacgccgagtttcaggagcgtctgcaagaagatacgtcttttgggggcaacctcgggcgagcagtcttccaggccaagaagcgggttctcgaacctctcggtctggttgaggaagctgctaagacggctcctggaaagaagagaccggtagaaccgtcacctcagcgttcccccgactcctccacgggcatcggcaagaaaggccagcagcccgctaaaaagagactgagctttggtcagactggcgactcagagtcagtccccgaccctcaaccaatcggagaaccaccagcaggcccctctggtctgggatctggtacaatggctgcaggcggtggcgctccaatggcagacaataacgaaggcgccgacggagtgggtagttcctcaggaaattggcattgcgattccacatggctgggcgacagagtcatcaccaccagcacccgaacctgggccctgcccacctacaacaaccacctctacaagcaaatatccaatgggacatcgggaggaagcaccaacgacaacacctacttcggctacagcaccccctgggggtattttgacttcaacagattccactgccacttctcaccacgtgactggcagcgactcatcaacaacaactggggattccggccaaaaagactcagcttcaagctcttcaacatccaggtcaaggaggtcacgcagaatgaaggcaccaagaccatcgccaataaccttaccagcacgattcaggtatttacggactcggaataccagctgccgtacgtcctcggctccgcgcaccagggctgcctgcctccgttcccggcggacgtcttcatgattccccagtacggctaccttacactgaacaatggaagtcaagccgtaggccgttcctccttctactgcctggaatattttccatctcaaatgctgcgaactggaaacaattctgaattcagctacaccttcgaggacgtgcctttccacagcagctacgcacacagccagagcttggaccgactgatgaatcctctcatcgaccagtacctgtactacttatccagaactcagtccacaggaggaactcaaggtacccagcaattgttattttctcaagctgggcctgcaaacatgtcggctcaggctaagaactggctacctggaccttgctaccggcagcagcgagtctctacgacactgtcgcaaaacaacaacagcaactttgcttggactggtgccaccaaatatcacctgaacggaagagactctttggtaaatcccggtgtcgccatggcaacccacaaggacgacgaggaacgcttcttcccgtcgagtggagtcctgatgtttggaaaacagggtgctggaagagacaatgtggactacagcagcgttatgctaaccagcgaagaagaaattaaaaccactaaccctgtagccacagaacaatacggtgtggtggctgacaacttgcagcaaaccaatacagggcctattgtgggaaatgtcaacagccaaggagccttacctggcatggtctggcagaaccgagacgtgtacctgcagggtcccatctgggccaagattcctcacacggacggcaacttccacccttcaccgctaatgggaggatttggactgaagcacccacctcctcagatcctgatcaagaacacgccggtacctgcggatcctccaacaacgttcagccaggcgaaattggcttccttcattacgcagtacagcaccggacaggtcagcgtggaaatcgagtgggagctgcagaaggagaacagcaaacgctggaacccagagattcagtacacttcaaactactacaaatctacaaatgtggactttgctgtcaatacagagggaacttattctgagcctcgccccattggtactcgttacctcacccgtaatctgtaa

SEQ ID NO: 262 - protein, 738 aa, Artificial Sequence
  Synthetic polypeptide
MAADGYLPDWLEDNLSEGIREWWDLKPGAPKPKANQQKQDDGRGLVLPGYKYLGPFNGLDKGEPVNAADAAALEHDKAYDQQLKAGDNPYLRYNHADAEFQERLQEDTSFGGNLGRAVFQAKKRVLEPLGPVEEAAKTAPGKKRPVEPPPQRSPDSSTGIGKKGQQPAKKRLNFGQTGDSESVPDPQPIGEPPAGPSGLGSGTMAAGGGAPMADNNEGADGVGSSSGNWHCDSTWLGDRVITTSTRTWALPTYNNHLYKQISNGTSGGSTNDNTYFGYSTPWGYFDFNRFHCHFSPRDWQRLINNNWGFRPKRLSFKLFNIQVKEVTQNEGTKTVANNLTSTIQVFTDSEYQLPYVLGSAHQGCLPPFPADVFMIPQYGYLTLNNGSQAVGRSSFYCLEYFPSQMLRTGNNFEFSYTFEDVPFHSSYAHSQSLDRLMNPLIDQYLYYLSRTQSTGGTQGTQQLLFSQAGPANMSAQAKNWLPGPCYRQQRVSTTLSQNNNSNFAWTGATKYHLNGRDSLVNPGVAMATHKDDEERFFPSSGVLMFGKQGAGRDNVDYSSVMLTSEEEIKTTNPVATEQYGVVADNLQQTNTGPIVGNVNSQGALPGMVWQNRDVYLQGPIWAKIPHTDGNFHPSPLMGGFGLKHPPPQILIKNTPVPADPPTTFSQAKLASFITQYSTGQVSVEIEWELQKENSKRWNPEIQYTSNYYKSTNVDFAVNTEGTYSEPRPIGTRYLTRNL

SEQ ID NO: 263 - DNA, 2217 bp, Artificial Sequence
  Synthetic polynucleotide
atggctgctgacggttatcttccagattggctcgaggacaacctctctgagggcattcgcgagtggtgggacctgaaacctggagcccccaagcccaaggccaaccagcagaagcaggacgacggccggggtctggtgcttcctggctacaagtacctcggacccttcaacggactcgacaagggggagcccgtcaacgcggcggacgcagcggccctcgagcacgacaaggcctacgaccagcagctcaaagcgggtgacaatccgtacctgcggtataaccacgccgacgccgagtttcaggagcgtctacaagaagatacgtcttttgggggcaacctcgggcgagcagtcttccaggccaagaagcgggttctcgaacctctcggtccggttgaggaagctgctaagacggctcctggaaagaagagaccggtagaaccgccacctcagcgttcccccgactcctccacgggcatcggcaagaaaggccagcagcccgctaaaaagagactgaactttggtcagactggcgactcagagtcagtccccgaccctcaaccaatcggagaaccaccagcaggcccctctggtctgggatctggtacaatggctgcaggcggtggcgctccaatggcagacaataacgaaggcgccgacggagtgggtagttcctcaggaaattggcattgcgattccacatggctgggcgacagagtcatcaccaccagcacccgaacctgggccctgcccacctacaacaaccacctctacaagcaaatatccaatgggacatcgggaggaagcaccaacgacaacacctacttcggctacagcaccccctgggggtattttgacttcaacagattccactgccacttctcaccacgtgactggcagcgactcatcaacaacaactggggattccggccaaaaagactcagcttcaagctcttcaacatccaggtcaaggaggtcacgcagaatgaaggcaccaagaccgtcgccaataaccttaccagcacgattcaggtatttacggactcggaataccagctgccgtacgtcctcggctccgcgcaccagggctgcctgcctccgttcccggcggacgtcttcatgattccccagtacggctaccttacactgaacaatggaagtcaagccgtaggccgttcctccttctactgcctggaatattttccatctcaaatgctgcgaactggaaacaattttgaattcagctacaccttcgaggacgtgcctttccacagcagctacgcacacagccagagcttggaccgactgatgaatcctctcatcgaccagtacctgtactacttatccagaactcagtccacaggaggaactcaaggtacccagcaattgttattttctcaagctgggcctgcaaacatgtcggctcaggctaagaactggctacctggaccttgctaccggcagcagcgagtctctacgacactgtcgcaaaacaacaacagcaactttgcttggactggtgccaccaaatatcacctgaacggaagagactctttggtaaatcccggtgtcgccatggcaacccacaaggacgacgaggaacgcttcttcccgtcgagtggagtcctgatgtttggaaaacagggtgctggaagagacaatgtggactacagcagcgttatgctaaccagcgaagaagaaattaaaaccactaaccctgtagccacagaacaatacggtgtggtggctgacaacttgcagcaaaccaatacagggcctattgtgggaaatgtcaacagccaaggagccttacctggcatggtctggcagaaccgagacgtgtacctgcagggtcccatctgggccaagattcctcacacggacggcaacttccacccttcaccgctaatgggaggatttggactgaagcacccacctcctcagatcctgatcaagaacacgccggtacctgcggatcctccaacaacgttcagccaggcgaaattggcttccttcattacgcagtacagcaccggacaggtcagcgtggaaatcgagtgggagctgcagaaggagaacagcaaacgttggaacccagagattcagtacacttcaaactactacaaatctacaaatgtggactttgctgtcaatacagagggaacttattctgagcctcgccccattggtactcgttacctcacccgtaatctgtaa

SEQ ID NO: 264 - protein, 738 aa, Artificial Sequence
  Synthetic polypeptide
MAADGYLPDWLEDNLSEGIREWWDLKPGAPKPKANQQKQDDGRGLVLPGYKYLGPFNGLDKGEPVNAADAAALEHDKAYDQQLKAGDNPYLRYNHADAEFQERLQEDTSFGGNLGRAVFQAKKRVLEPLGLVEEAAKTAPGKKRPVEPSPQRSPDSSTGIGKKGQQPAKKRLNFGQTGDSESVPDPQPIGEPPAGPSGLGSGTMAAGGGAPMADNNEGADGVGSSSGNWHCDSTWLGDRVITTSTRTWALPTYNNHLYKQISNGTSGGSTNDNTYFGYSTPWGYFDFNRFHCHFSPRDWQRLINNNWGFRPKRLSFKLFNIQVKEVTQNEGTKTIANNLTSTIQVFTDSEYQLPYVLGSAHQGCLPPFPADVFMIPQYGYLTLNNGSQAVGRSSFYCLEYFPSQMLRTGNNFEFSYTFEDVPFHSSYAHSQSLDRLMNPLIDQYLYYLSRTQSTGGTQGTQQLLFSQAGPANMSAQAKNWLPGPCYRQQRVSTTLSQSNNSNFAWTGATKYHLNGRDSLVNPGVAMATHKDDEERFFPSSGVLMFGKQGAGRDNVDYSSVMLTSEEEIKTTNPVATEQYGVVADNLQQTNTGPIVGNVNSQGALPGMVWQNRDVYLQGPIWAKIPHTDGNFHPSPLMGGLGLKHPPPQILIKNTPVPADPPTTFSQAKLASFITQYSTGQVSVEIEWELQKENSKRWNPEIQYTSNYYKSTNVDFAVNTEGTYSEPRPIGTRYLTRNL

SEQ ID NO: 265 - DNA, 2217 bp, Artificial Sequence
  Synthetic polynucleotide
atggctgctgacggttatcttccagattggctcgaggacaacctctctgagggcattcgcgagtggtgggacctgaaacctggagcccccaagcccaaggccaaccagcagaagcaggacgacggccggggtctggtgcttcctggctacaagtacctcggacccttcaacggactcgacaagggggagcccgtcaacgcggcggacgcagcggccctcgagcacgacaaggcctacgaccagcagctcaaagcgggtgacaatccgtacctgcggtataaccacgccgacgccgagtttcaggagcgtctgcaagaagatacgtcttttgggggcaacctcgggcgagcagtcttccaggccaagaagcgggttctcgaacctctcggtctggttgaggaagcggctaagacggctcctggaaagaagagaccggtagaaccgtcacctcagcgttcccccgactcctccacgggcatcggcaagaaaggccagcagcccgctaaaaagagactgaactttggtcagactggcgactcagagtcagtccccgaccctcaaccaatcggagaaccaccagcaggcccctctggtctgggatctggtacaatggctgcaggcggtggcgctccaatggcagacaataacgaaggcgccgacggagtgggtagttcctcaggaaattggcattgcgattccacatggctgggcgacagagtcatcaccaccagcacccgaacctgggccctgcccacctacaacaaccacctctacaagcaaatatccaatgggacatcgggaggaagcaccaacgacaacacctacttcggctacagcaccccctgggggtattttgacttcaacagattccactgccacttctcaccacgtgactggcagcgactcatcaacaacaactggggattccggccaaaaagactcagcttcaagctcttcaacatccaggtcaaggaggtcacgcagaatgaaggcaccaagaccatcgccaataaccttaccagcacgattcaggtatttacggactcggaataccagctgccgtacgtcctcggctccgcgcaccagggctgcctgcctccgttcccggcggacgtcttcatgattccccagtacggctaccttacactgaacaatggaagtcaagccgtaggccgttcctccttctactgcctggaatattttccatctcaaatgctgcgaactggaaacaattttgaattcagctacaccttcgaggacgtgcctttccacagcagctacgcacacagccagagcttggaccgactgatgaatcctctcatcgaccagtacctgtactacttatccagaactcagtccacaggaggaactcaaggtacccagcaattgttattttctcaagctgggcctgcaaacatgtcggctcaggctaagaactggctacctggaccttgctaccggcagcagcgagtctctacgacactgtcgcaaagcaacaacagcaactttgcttggactggtgccaccaaatatcacctgaacggaagagactctttggtaaatcccggtgtcgccatggcaacccacaaggacgacgaggaacgcttcttcccgtcgagtggagtcctgatgtttggaaaacagggtgctggaagagacaatgtggactacagcagcgttatgctaaccagcgaagaagaaattaaaaccactaaccctgtagccacagaacaatacggtgtggtggctgacaacttgcagcaaaccaatacagggcctattgtgggaaatgtcaacagccaaggagccttacctggcatggtctggcagaaccgagacgtgtacctgcagggtcccatctgggccaagattcctcacacggacggcaacttccacccttcaccgctaatgggaggacttggactgaagcacccacctcctcagatcctgatcaagaacacgccggtacctgcggatcctccaacaacgttcagccaggcgaaattggcttccttcattacgcagtacagcaccggacaggtcagcgtggaaatcgagtgggagctgcagaaggagaacagcaaacgctggaacccagagattcagtacacttcaaactactacaaatctacaaatgtggactttgctgtcaatacagagggaacttattctgagcctcgccccattggtactcgttacctcacccgtaatctgtaa

SEQ ID NO: 266 - protein, 737 aa, Artificial Sequence
  Synthetic polypeptide
MAADGYLPDWLEDNLSEGIREWWDLKPGAPKPKANQQKQDDGRGLVLPGYKYLGPFNGLDKGEPVNAADAAALEHDKAYDQQLKAGDNPYPRYNHADAEFQERLQEDTPFGGNLGRAVFQAKKRVLEPLGLVEEAAKTAPGKKRPVEPSPQRSPDSSTGIGKKGQQPAKKRLNFGQTGDSESVPDPQPIGEPPAGPSGLGSGTMAAGGGAPMADNNEGADGVGNASGNWHCDSTWLGDRVITTSTRTWALPTYNNHLYKQISSASTGASNDNHYFGYSTPWGYFDFNRFHCHFSPRDWQRLINNNWGFRPKRLNFKLFNIQVKEVTTNDGVTTIANNLTSTVQVFSDSEYQLPYVLGSAHQGCLPPFPADVFMIPQYGYLTLNNGSQAVGRSSFYCLEYFPSQMLRTGNNFTFSYTFEEVPLHSSYAHSQSLDRLMNPLIVQYLYYLNRTQNQSGSAQNKDLLFSRGSPAGMSVQPKNWLPGPCYRQQRVSKTKTDNNNSNFTWTGASKYNLNGRESIINPGTAMASHKDDEDKFFPMSGVMIFGKESAGASNTALDNVMITDEEEIKATNPVATERFGTVAVNFQSSSTDPATGDVHAMGALPGMVWQDRDVYLQGPIWAKIPHTDGHFHPSPLMGGFGLKNPPPQILIKNTPVPANPPAEFSATKFASFITQYSTGQVSVEIEWELQKENSKRWNPEVQYTSNYAKSASVDFTVDNNGLYTEPRPIGTRYLTRPL

SEQ ID NO: 267 - protein, 737 aa, Artificial Sequence
  Synthetic polypeptide
MAADGYLPDWLEDNLSEGIREWWDLKPGAPKPKANQQKQDDGRGLVLPGYKYLGPFNGLDKGEPVNAADAAALEHDKAYDQQLKAGDNPYPRYNHADAEFQERLQEDTSFGGNLGRAVFQAKKRVLEPLGLVEEAAKTAPGKKRPVEPSPQRSPDSSTGIGKKGQQPAKKRLNFGQTGDSESVPDPQPIGEPPAGPSGLGSGTMAAGGGAPMADNNEGADGVGNASGNWHCDSTWLGDRVITTSTRTWALPTYNNHLYKQISSASTGASNDNHYFGYSTPWGYFDFNRFHCHFSPRDWQRLINNNWGFRPKRLNFKLFNIQVKEVTTNDGVTTIANNLTSTVQVFSDSEYQLPYVLGSAHQGCLPPFPADVFMIPQYGYLTLNNGSQAVGRSSFYCLEYFPSQMLRTGNNFTFSYTFEEVPLHSSYAHSQSLDRLMNPLIDQYLYYLNRTQNQSGSAQNKDLLFSRGSPAGMSVQPKNWLPGPCYRQQRVSKTKTDNNNSNFTWTGASKYNLNGRESIINPGTAMASHKDDEDKFFPMSGVMIFGKESAGASNTALDNVMITDEEEIKATNPVATERFGTVAVNFQSSSTDPATGDVHAMGALPGMVWQDRDVYLQGPIWAKIPHTDGHFHPSPLMGGFGLKNPPPQILIKNTPVPANPPAEFSATKFASFITQYSTGQVSVEIEWELQKENSKRWNPEVQYTSNYAKSASVDFTVDNNGLYTEPRPIGTRYLTRPL

SEQ ID NO: 268 - DNA, 2214 bp, Artificial Sequence
  Synthetic polynucleotide
atggctgctgacggttatcttccagattggctcgaggacaacctctctgagggcattcgcgagtggtgggacctgaaacctggagcccccaagcccaaggccaaccagcagaagcaggacgacggccggggtctggtgcttcctggctacaagtacctcggacccttcaacggactcgacaagggggagcccgtcaacgcggcggacgcagcggccctcgagcacgacaaggcctacgaccagcagctcaaagcgggtgacaatccgtacccgcggtataaccacgccgacgccgagtttcaggagcgtctgcaagaagatacgccttttgggggcaacctcgggcgagcagtcttccaggccaagaagcgggttctcgaacctctcggtctggttgaggaagctgctaagacggctcctggaaagaagagaccggtagaaccgtcacctcagcgttcccccgactcctccacgggcatcggcaagaaaggccagcagcccgctaaaaagagactgaactttggtcagactggcgactcagagtcagtccccgaccctcaaccaatcggagaaccaccagcaggcccctctggtctgggatctggtacaatggctgcaggcggtggcgctccaatggcagacaataacgaaggcgccgacggagtgggtaatgcctcaggaaattggcattgcgattccacatggctgggcgacagagtcatcaccaccagcacccgcacctgggccttgcccacctacaataaccacctctacaagcaaatctccagtgcttcaacgggggccagcaacgacaaccactacttcggctacagcaccccctgggggtattttgatttcaacagattccactgccacttttcaccacgtgactggcagcgactcatcaacaacaattggggattccggcccaagagactcaacttcaaactcttcaacatccaagtcaaggaggtcacgacgaatgatggcgtcacaaccatcgctaataaccttaccagcacggttcaagtcttctcggactcggagtaccagcttccgtacgtcctcggctctgcgcaccagggctgcctccctccgttcccggcggacgtgttcatgattccgcaatacggctacctgacgctcaacaatggcagccaagccgtgggacgttcatccttttactgcctggaatatttcccttctcagatgctgagaacgggcaacaactttaccttcagctacacctttgaggaagtgcctctccacagcagctacgcgcacagccagagcctggaccggctgatgaatcctctcatcgtccaatacctgtattacctgaacagaactcaaaatcagtccggaagtgcccaaaacaaggacttgctgttcagccgtgggtctccagctggcatgtctgttcagcccaaaaactggctacctggaccctgttatcggcagcagcgcgtttctaaaacaaaaacagacaacaacaacagcaattttacctggactggtgcttcaaaatataacctcaatgggcgtgaatccatcatcaaccctggcactgctatggcctcacacaaagacgacgaagacaagttctttcccatgagcggtgtcatgatttttggaaaagagagcgccggagcttcaaacactgcattggacaatgtcatgattacagacgaagaggaaattaaagccactaaccctgtggccaccgaaagatttgggaccgtggcagtcaatttccagagcagcagcacagaccctgcgaccggagatgtgcatgctatgggagcattacctggcatggtgtggcaagatagagacgtgtacctgcagggtcccatttgggccaaaattcctcacacagatggacactttcacccgtctcctcttatgggcggctttggactcaagaacccgcctcctcagatcctcatcaaaaacacgcctgttcctgcgaatcctccggcggagttttcagctacaaagtttgcttcattcatcacccaatactccacaggacaagtgagtgtggaaattgaatgggagctgcagaaagaaaacagcaagcgctggaatcccgaagtgcagtacacatccaattatgcaaaatctgccagcgttgattttactgtggacaacaatggactttatactgagcctcgccccattggcacccgttaccttacccgtcccctgtaa

SEQ ID NO: 269 - protein, 736 aa, Artificial Sequence
  Synthetic polypeptide
MAADGYLPDWLEDTLSEGIRQWWKLRPGPPPPKPAERHKDDSRGLVLPGYKYLGPFNGLDKGEPVNEADAAALEHDKAYDRQLDSGDNPYLKYNHADAEFQERLKEDTSFGGNLGRAVFQAKKRVLEPLGLVEEGAETAPGKKRPVEQSPQGPDSSSGIGKTGQQPAKKRLNFGQTGDSESVPDPQPLGEPPATPAAVGPTTMASGGGAPMADNNEGADGVGNASGNWHCDSTWLGDRVITTSTRTWALPTYNNHLYKQISSASTGASNDNHYFGYSTPWGYFDFNRFHCHFSPRDWQRLINNNWGFRPKRLNFKLFNIQVKEVTTNDGVTTIANNLTSTVQVFSDSEYQLPYVLGSAHQGCLPPFPADVFMIPQYGYLTLNNGSQAVGRSSFYCLEYFPSQMLRTGNNFTFSYTFEEVPFHSSYAHSQSLDRLMNPLIDQYLYYPNRTQNQSGSAQNKDLLFSRGSPAGMSVQPKNWLPGPCYRQQRVSKTKTDNNNSNFTWTGASKYNLNGRESIINPGTAMASHKDDEDKFFPMSGVMIFGKESAGASNTALDNVMITDEEEIKATNPVATERFGTVAVNFQSSSTDPATGDVHAMGALPGMVWQGRDVYLQGPIWAKIPHTDGHFHPSPLMGGFGLKNPPPQILIKNTPVPANPPAEFSATKFASFITQYSTGQVSVEIEWELQKENSKRWNPEVQYTSNYAKSANVDFTVDNNGLYTEPRPIGTRYLTRPL

SEQ ID NO: 270 - DNA, 2211 bp, Artificial Sequence
  Synthetic polynucleotide
atggctgccgatggttatcttccagattggctcgaggacactctctctgaaggaataagacagtggtggaagctcagacctggcccaccaccaccaaagcccgcagagcggcataaggacgacagcaggggtcttgtgcttcctgggtacaagtacctcggacccttcaacggactcgacaagggagagccggtcaacgaggcagacgccgcggccctcgagcacgacaaagcctacgaccggcagctcgacagcggagacaacccgtacctcaagtacaaccacgccgacgcggagtttcaggagcgccttaaagaagatacgtcttttgggggcaacctcgggcgagcagtcttccaggccaagaagcgggttctcgaacctctcggtctggttgaggaaggcgctgagacggctcctggaaagaaacgtccggtagagcagtcgccacaagggccagactcctcctcgggcatcggcaagacaggccagcagcccgctaaaaagagactcaattttggtcagactggcgactcagagtcagtccccgatccacaacctctcggagaacctccagcaacccccgctgctgtgggacctactacaatggcttcaggcggtggcgcaccaatggcagacaataacgaaggcgccgacggagtgggtaatgcctcaggaaattggcattgcgattccacatggctgggcgacagagtcatcaccaccagcacccgcacctgggccttgcccacctacaataaccacctctacaagcaaatctccagtgcttcaacgggggccagcaacgacaaccactacttcggctacagcaccccctgggggtattttgatttcaacagattccactgccacttttcaccacgtgactggcagcgactcatcaacaacaattggggattccggcccaagagactcaacttcaaactcttcaacatccaagtcaaggaggtcacgacgaatgatggcgtcacaaccatcgctaataaccttaccagcacggttcaagtcttctcggactcggagtaccagcttccgtacgtcctcggctctgcgcaccagggctgcctccctccgttcccggcggacgtgttcatgattccgcaatacggctacctgacgctcaacaatggcagccaagccgtgggacgttcatccttttactgcctggaatatttcccttctcagatgctgagaacgggcaacaactttaccttcagctacacctttgaggaagtgcctttccacagcagctacgcgcacagccagagcctggaccggctgatgaatcctctcatcgaccaatacctgtattacccgaacagaactcaaaatcagtccggaagtgcccaaaacaaggacttgctgtttagccgtgggtctccagctggcatgtctgttcagcccaaaaactggctacctggaccctgttatcggcagcagcgcgtttctaaaacaaaaacagacaacaacaacagcaattttacctggactggtgcttcaaaatataacctcaatgggcgtgaatccatcatcaaccctggcactgctatggcctcacacaaagacgacgaagacaagttctttcccatgagcggtgtcatgatttttggaaaagagagcgccggagcttcaaacactgcattggacaatgtcatgattacagacgaagaggaaattaaagccactaaccctgtggccaccgaaagatttgggaccgtggcagtcaatttccagagcagcagcacagaccctgcgaccggagatgtgcatgctatgggagcattacctggcatggtgtggcaaggtagagacgtgtacctgcagggtcccatttgggccaaaattcctcacacagatggacactttcacccgtctcctcttatgggcggctttggactcaagaacccgcctcctcagatcctcatcaaaaacacgcctgttcctgcgaatcctccggcggagttttcagctacaaagtttgcttcattcatcacccaatactccacaggacaagtgagtgtggaaattgaatgggagctgcagaaagaaaacagcaagcgctggaatcccgaagtgcagtacacatccaattatgcaaaatctgccaacgttgattttactgtggacaacaatggactttatactgagcctcgccccattggcacccgttaccttacccgtcccctgtaa

SEQ ID NO: 271 - protein, 736 aa, Artificial Sequence
  Synthetic polypeptide
MAADGYLPDWLEDTLSEGIRQWWKLRPGPPPPKPAERHKDDSRGLVLPGYKYLGPFNGLDKGEPVNEADAAALEHDKAYDRQLDSGDNPYLKYNHADAEFQERLKEDTSFGGNLGRAVFQAKKRVLEPLGLVEEGAKTAPGKKRPVEQSPQGPDSSSGIGKTGQQPAKKRLNFGQTGDSESVPDPQPLGEPPATPAAVGPTTMASGGGAPMADNNEGADGVGNASGNWHCDSTWLGDRVITTSTRTWALPTYNNHLYKQISSASTGASNDNHYFGYSTPWGYFDFNRFHCHFSPRDWQRLINNNWGFRPKRLNFKLFNIQVKEVTTNDGVTTIANNLTSTVQVFSDSEYQLPYVLGSAHQGCLPPFPADVFMIPQYGYLTLNNGSQAVGRSSFYCLEYFPSQMLRTGNNFTFSYTFEEVPFHSSYAHSQSLDRLMNPLIDQYLYYPNRTQNQSGSAQNKDLLFSRGSPAGMSVQPKNWLPGPCYRQQRVSKTKTDNNNSNFTWTGASKYNLNGRESIINPGTAMASHKDDEDKFFPMSGVMIFGKESAGASNTALDNVMITDEEEIKATNPVATERFGTVAVNFQSSSTDPATGDVHAMGALPGMVWQGRDVYLQGPIWAKIPHTDGHFHPSPLMGGFGLKNPPPQILIKNTPVPANPPAEFSATKFASFITQYSTGQVSVEIEWELQKENSKRWNPEVQYTSNYAKSANVDFTVDNNGLYTEPRPIGTRYLTRPL

SEQ ID NO: 272 - protein, 736 aa, Artificial Sequence
  Synthetic polypeptide
MAADGYLPDWLEDTLSEGIRQWWKLRPGPPPPKPAERHKDDSRGLVLPGYKYLGPFNGLDKGEPVNEADAAALEHDKAYDRQLDSGDNPYLKYNHADAEFQERLKEDTSFGGNLGRAVFQAKKRVLEPLGLVEEGAKTAPGKKRPVEQSPQGPDSSSGIGKTGQQPAKKRLNFGQTGDSESVPDPQPLGEPPATPAAVGPTTMASGGGAPMADNNEGADGVGNASGNWHCDSTWLGDRVITTSTRTWALPTYNNHLYKQISSASTGASNDNHYFGYSTPWGYFDFNRFHCHFSPRDWQRLINNNWGFRPKRLNFKLFNIQVKEVTTNDGVTTIANNLTSTVQVFSDSEYQLPYVLGSAHQGCLPPFPADVFMIPQYGYLTLNNGSQAVGRSSFYCLEYFPSQMLRTGNNFTFSYTFEEVPFHSSYAHSQSLDRLMNPLIDQYLYYLNRTQNQSGSAQNKDLLFSRGSPAGMSVQPKNWLPGPCYRQQRVSKTKTDNNNSNFTWTGASKYNLNGRESIINPGTAMASHKDDEDKFFPMSGVMIFGKESAGASNTALDNVMITDEEEIKATNPVATERFGTVAVNFQSSSTDPATGDVHAMGALPGMVWQGRDVYLQGPIWAKIPHTDGHFHPSPLMGGFGLKNPPPQILIKNTPVPANPPAEFSATKFASFITQYSTGQVSVEIEWELQKENSKRWNPEVQYTSNYAKSANVDFTVDNNGLYTEPRPIGTRYLTRPL

SEQ ID NO: 273 - protein, 736 aa, Artificial Sequence
  Synthetic polypeptide
MAADGYLPDWLEDTLSEGIRQWWKLRPGPPPPKPAERHKDDSRGLVLPGYKYLGPFNGLDKGEPVNEADAAALEHDKAYDRQLDSGDNPYLKYNHADAEFQERLKEDTSFGGNLGRAVFQAKKRVLEPLGLVEEGAKTAPGKKRPVEQSPQGPDSSSGIGKTGQQPAKKRLNFGQTGDSESVPDPQPLGEPPATPAAVGPTTMASGGGAPMADNNEGADGVGNASGNWHCDSTWLGDRVITTSTRTWALPTYNNHLYKQISSASTGASNDNHYFGYSTPWGYFDFNRFHCHFSPRDWQRLINNNWGFRPKRLNFKLFNIQVKEVTTNDGVTTIANNLTSTVQVFSDSEYQLPYVLGSAHQGCLPPFPADVFMIPQYGYLTLNNGSQAVGRSSFYCLEYFPSQMLRTGNNFTFSYTFEEVPFHSSYAHSQSLDRLMNPLIDQYLYYLNRTQNQSGSAQNKDLLFSRGSPAGMSVQPKNWLPGPCYRQQRVSKTKTDNNNSNFTWTGASKYNLNGRESIINPGTAMASHKDDEDKFFPMSGVMIFGKESAGASNTALDNVMITDEEEIKATNPVATERFGTVAVNFQSSSTDPATGDVHAMGALPGMVWQDRDVYLQGPIWAKIPHTDGHFHPSPLMGGFGLKNPPPQILIKNTPVPANPPAEFSATKFASFITQYSTGQVSVEIEWELQKENSKRWNPEVQYTSNYAKSANVDFTVDNNGLYTEPRPIGTRYLTRPL

SEQ ID NO: 274 - DNA, 2208 bp, Artificial Sequence
  Synthetic polynucleotide
atggctgccgatggctatcttccagattggctcgaggacactctctctgaaggaataagacagtggtggaagctcaaacctggcccaccaccaccaaagcccgcagagcggcatagggacgacagcaggggtcttgtgcttcctgggtacaagtacctcggacccttcaacggactcgacaagggagagccggtcaacgaggcagacgccgcggccctcgagcacgacaaagcctacgaccggcagctcgacagcggagacaacccgtacctcaagtacaaccacgccgacgcggagtttcaggagcgccttaaagaagatacgtcttttgggggcaacctcggacgagcagtcttccaggcgaaaaagagggttcttgaacctctgggcctggttgaggaacctgttaagacggctccgggaaaaaagaggccggtagagcactctcctgtggagccagactcctcctcgggaaccggaaaggcgggccagcagcctgcaagaaaaagattgaattttggtcagactggagacgcagactcagtacctgacccccagcctctcggacagccaccagcagccccctctggtctgggaactaatacgatggctacaggcagtggcgcaccaatggcagacaataacgagggcgccgacggagtgggtaattcctcgggaaattggcattgcgattccacatggatgggcgacagagtcatcaccaccagcacccgaacctgggccctgcccacctacaacaaccacctctacaaacaaatttccagccaatcaggagcctcgaacgacaatcactactttggctacagcaccccttgggggtattttgacttcaacagattccactgccacttttcaccacgtgactggcaaagactcatcaacaacaactggggattccgacccaagagactcaacttcaagctctttaacattcaagtcaaagaggtcacgcagaatgacggtacgacgacgattgccaataaccttaccagcacggttcaggtgtttactgactcggggtaccagctcccgtacgtcctcggctcggcgcatcaaggatgcctcccgccgttcccagcagacgtcttcatggtgccacagtatggataccccaccctgaacaacgggagtcaggcagtaggacgctcttcattttactgcctggagtactttccttctcagatgctgcgtaccggaaacaactttaccttcagctacacttttgaggacgttcctttccacagcagctacgctcacagccagagtctggaccgtctcatgaatcctctcatcgaccagtacctgtattacttgagcacaacaaacactccaagtggaaccaccacgcagtcaaggcttcagttttctcaggccggagcgagtgacattcgggaccagtctaggaactggcttcctggaccctgttaccgccagcagcgagtatcaaagacatctgcggataacaacaacagtgaatactcgtggactggagctaccaagtaccacctcaatggcagagactctctggtgaatccgggcccggccgtggcaagccacaaggacgatgaagaaaagttttttcctcagagcggggttctcatctttgggaagcaaggctcagagaaaacaaatgtggacattgaaaaggtcatgattacagacgaagaggaaatcaggacaaccaatcccgtggctacggagcagtatggttctgtatctaccaacctccagagaggcaacagacaagcagctaccgcagatgtcaacacacaaggcgttcttccaggcatggtctggcaggacagagatgtgtaccttcaggggcccatctgggcaaagattccacacacggacggacattttcacccctctcccctcatgggtggattcggacttaaacaccctcctccacagattctcatcaagaacaccccggtacctgcgaatccttcgaccaccttcagtgcggcaaagtttgcttccttcatcacacagtactccacgggacaggtcagcgtggagatcgagtgggagctgcagaaggaaaacagcaaacgctggaatcccgaaattcagtacacttccaactacaacaagtctgttaatgtggactttactgtggacactaatggcgtgtattcagagcctcgccccattggcaccagatacctgactcgtaatctgtaa

SEQ ID NO: 275 - protein, 735 aa, Artificial Sequence
  Synthetic polypeptide
MAADGYLPDWLEDTLSEGIRQWWKLKPGPPPPKPAERHRDDSRGLVLPGYKYLGPFNGLDKGEPVNEADAAALEHDKAYDRQLDSGDNPYLKYNHADAEFQERLKEDTSFGGNLGRAVFQAKKRVLEPLGLVEEPVKTAPGKKRPVEHSPVEPDSSSGTGKAGQQPARKRLNFGQTGDADSVPDPQPLGQPPAAPSGLGTNTMATGSGAPMADNNEGADGVGNSSGNWHCDSTWMGDRVITTSTRTWALPTYNNHLYKQISSQSGASNDNHYFGYSTPWGYFDFNRFHCHFSPRDWQRLINNNWGFRPKRLNFKLFNIQVKEVTQNDGTTTIANNLTSTVQVFTDSGYQLPYVLGSAHQGCLPPFPADVFMVPQYGYPTLNNGSQAVGRSSFYCLEYFPSQMLRTGNNFTFSYTFEDVPFHSSYAHSQSLDRLMNPLIDQYLYYLSTTNTPSGTTTQSRLQFSQAGASDIRDQSRNWLPGPCYRQQRVSKTSADNNNSEYSWTGATKYHLNGRDSLVNPGPAVASHKDDEEKFFPQSGVLIFGKQGSEKTNVDIEKVMITDEEEIRTTNPVATEQYGSVSTNLQRGNRQAATADVNTQGVLPGMVWQDRDVYLQGPIWAKIPHTDGHFHPSPLMGGFGLKHPPPQILIKNTPVPANPSTTFSAAKFASFITQYSTGQVSVEIEWELQKENSKRWNPEIQYTSNYNKSVNVDFTVDTNGVYSEPRPIGTRYLTRNL

SEQ ID NO: 276 - DNA, 2211 bp, Artificial Sequence
  Synthetic polynucleotide
atggctgccgacggttatcttccagattggctcgaggacactctctctgaaggaataagacagtggtggaagctcaaacctggcccaccaccaccaaagcccgcagagcggcataaggacgacagcaggggtcttgtgcttcctgggtacaagtacctcggacccttcaacggactcgacaagggagagccggtcaacgaggcagacgccgcggccctcgagcacgacaaagcctacgaccggcagctcgacagcggagacaacccgtacctcaagtacaaccacgccgacgcggagtttcaggagcgccttaaagaagatacgtcttttgggggcaacctcgggcgggcagtcttccaggccaagaagcgggttctcgaacctctcggtctggttgaggaaggcgctaagacggctcctggaaagaaacgtccggtagagcagtcgccacaagagccagactccccctcgggcatcggcaagacaggccagcagcccgctaaaaagagactcaattttggtcagactggcgactcagagtcagtccccgatccacaacctctcggagaacctccagcaacccccgctgctgtgggacctactacaatggcttcaggcggtggcgcaccaatggcagacaataacgaaggcgccgacggagtgggtaatgcctcaggaaattggcactgcgattccacatggctgggcgacagagtcatcaccaccagcacccgcacctgggccttgcccacctacaataaccacctctacaagcaaatctccagtgcttcaacgggggccagcaacgacaaccactacttcggctacagcaccccctgggggtattttgatttcaacagattccactgccacttttcaccacgtgactggcagcgactcatcaacaacaattggggattccggcccaagagactcaacttcaaactcttcaacatccaagtcaaggaggtcacgacgaatgatggcgtcacaaccatcgctaataaccttaccagcacggttcaagtcttctcggactcggagtaccagcttccgtacgtcctcggctctgcgcaccagggccgcctccctccgttcccggcggacgtgttcatgattccgcaatacggctacctgacgctcaacaatggcagccaagccgtgggacgttcatcctcttactgcctggaatatttcccttctcagatgctgagaacgggcaacaactttaccttcagctacacctttgaggaagtgcctctccacagcagctgcgcgcacagccagagcctggaccggctgatgaatcctctcatcgaccaatacctgtattacctgaacagaactcaaaatcagtccggaagtgcccaaaacagggacttgctgttcagccgtgggtctccagctggcatgtctgttcagcccaaaaactggctacctggaccctgttatcggcagcagcgcgtttctaaaacaaaaacagacaacaacaacagcaattttacctggactggtgcttcaaaatataacctcaatgggcgtgaatccatcatcaaccctggcactgctatggcctcacacaaagacgacgaagacaagttctttcccatgagcggtgtcatgatttttggaaaagagagcgccggagcttcaaacactgcattggacaatgtcatgattacagacgaagaggaaattaaagccactaaccctgtggccaccgaaagatttgggaccgtggcagtcaatttccagagcagcagcacagaccctgcgaccggagatgtgcatgctatgggagcattacctggcatggtgtggcaagatagagacgtgtacctgcagggtcccatttgggccaaaattcctcacacagatggacactttcacccgtctcctcttatgggcggctttggactcaagaacccgcctcctcagatcctcatcaaaaacacgcctgttcctgcgaatcctccggcggagttttcagctacaaagtttgcttcattcatcacccaatactccgcaggacaagtgagtgtggaaattgaatgggagctgcagaaagaaaacagcaagcgctggaatcccgaagtgcagtacacatccaattatgcaaaatctgccaacgttgattttactgtggacaacaatggactttatactgagcctcgccccattggcacccgttaccttacccgtcccctgtaa

SEQ ID NO: 277 - protein, 736 aa, Artificial Sequence
  Synthetic polypeptide
MAADGYLPDWLEDTLSEGIRQWWKLKPGPPPPKPAERHKDDSRGLVLPGYKYLGPFNGLDKGEPVNEADAAALEHDKAYDRQLDSGDNPYLKYNHADAEFQERLKEDTSFGGNLGRAVFQAKKRVLEPLGLVEEGAKTAPGKKRPVEQSPQEPDSPSGIGKTGQQPAKKRLNFGQTGDSESVPDPQPLGEPPATPAAVGPTTMASGGGAPMADNNEGADGVGNASGNWHCDSTWLGDRVITTSTRTWALPTYNNHLYKQISSASTGASNDNHYFGYSTPWGYFDFNRFHCHFSPRDWQRLINNNWGFRPKRLNFKLFNIQVKEVTTNDGVTTIANNLTSTVQVFSDSEYQLPYVLGSAHQGRLPPFPADVFMIPQYGYLTLNNGSQAVGRSSSYCLEYFPSQMLRTGNNFTFSYTFEEVPLHSSCAHSQSLDRLMNPLIDQYLYYLNRTQNQSGSAQNRDLLFSRGSPAGMSVQPKNWLPGPCYRQQRVSKTKTDNNNSNFTWTGASKYNLNGRESIINPGTAMASHKDDEDKFFPMSGVMIFGKESAGASNTALDNVMITDEEEIKATNPVATERFGTVAVNFQSSSTDPATGDVHAMGALPGMVWQDRDVYLQGPIWAKIPHTDGHFHPSPLMGGFGLKNPPPQILIKNTPVPANPPAEFSATKFASFITQYSAGQVSVEIEWELQKENSKRWNPEVQYTSNYAKSANVDFTVDNNGLYTEPRPIGTRYLTRPL

SEQ ID NO: 278 - protein, 736 aa, Artificial Sequence
  Synthetic polypeptide
MAADGYLPDWLEDTLSEGIRQWWKLKPGPPPPKPAERHKDDSRGLVLPGYKYLGPFNGLDKGEPVNEADAAALEHDKAYDRQLDSGDNPYLKYNHADAEFQERLKEDTSFGGNLGRAVFQAKKRVLEPLGLVEEGAKTAPGKKRPVEQSPQEPDSSSGIGKTGQQPAKKRLNFGQTGDSESVPDPQPLGEPPATPAAVGPTTMASGGGAPMADNNEGADGVGNASGNWHCDSTWLGDRVITTSTRTWALPTYNNHLYKQISSASTGASNDNHYFGYSTPWGYFDFNRFHCHFSPRDWQRLINNNWGFRPKRLNFKLFNIQVKEVTTNDGVTTIANNLTSTVQVFSDSEYQLPYVLGSAHQGCLPPFPADVFMIPQYGYLTLNNGSQAVGRSSFYCLEYFPSQMLRTGNNFTFSYTFEEVPLHSSCAHSQSLDRLMNPLIDQYLYYLNRTQNQSGSAQNRDLLFSRGSPAGMSVQPKNWLPGPCYRQQRVSKTKTDNNNSNFTWTGASKYNLNGRESIINPGTAMASHKDDEDKFFPMSGVMIFGKESAGASNTALDNVMITDEEEIKATNPVATERFGTVAVNFQSSSTDPATGDVHAMGALPGMVWQDRDVYLQGPIWAKIPHTDGHFHPSPLMGGFGLKNPPPQILIKNTPVPANPPAEFSATKFASFITQYSTGQVSVEIEWELQKENSKRWNPEVQYTSNYAKSANVDFTVDNNGLYTEPRPIGTRYLTRPL

SEQ ID NO: 279 - DNA, 2208 bp, Artificial Sequence
  Synthetic polynucleotide
atggctgccgatggctatcttccagattggctcgaggacactctctctgaaggaataagacagtggtggaagctcaaacctggcccaccaccaccaaagcccgcagagcggcatagggacgacagcaggggtcttgtgcttcctgggtacaagtacctcggacccttcaacggactcgacaagggagagccggtcaacgaggcagacgccgcggccctcgagcacgacaaagcctacgaccggcagctcgacagcggagacaacccgtacctcaagtacaaccacgccgacgcggagtttcaggagcgccttaaagaagatacgtcttttgggggcaacctcggacgagcagtcttccaggcgaaaaagagggttcttgaacctctgggcctggttggggaacctgttaagacggctccgggaaaaaagaggccggtagagcactctcctgtggagccagactcctcctcgggaaccggaaaggcgggccagcagcctgcaagaaaaagattgaattttggtcagactggagacgcagactcagtacctgacccccagcctctcggacagccaccagcagccccctctggtctgggaactaatacgatggctacaggcagtggcgcaccaatggcagacaataacgagggcgccgacggagtgggtaattcctcgggaaattggcattgcgattccacatggatgggcgacagagtcatcaccaccagcacccgaacctgggccctgcccacctacaacaaccacctctacaaacaaatttccagccaatcaggagcctcgaacgacagtcactactttggctacagcaccccttgggggtattttgacttcaacagattccactgccacttttcaccacgtgactggcaaagactcatcaacaacaactggggattccgacccaagagactcaacttcaagctctttaacattcaagtcaaagaggtcacgcagaatgacggtacgacgacgattgccaataaccttaccagcacggttcaggtgtttactgactcggagtaccagctcccgtacgtcctcggctcggcgcatcaaggatgcctcccgccgttcccagcagacgtcttcatggtgccacagtatggatacctcaccctgaacaacgggagtcaggcagtaggacgctcttcattttactgcctggagtactttccttctcagatgctgcgtaccggaaacaactttaccttcagctacacttttgaggacgttcctttccacagcagctacgctcacagccagagtctggaccgtctcatgaatcctctcatcgaccagtacctgtattacttgagcacaacaaacactccaagtggaaccaccacgcagtcaaggctccagttttctcaggccggagcgagtgacattcgggaccagtctaggaactggcttcctggaccctgttaccgccagcagcgagtatcaaagacatctgcggataacaacaacagtgaatactcgtggactggagctaccaagtaccacctcaatggcagagactctctggtgaatccgggcccggccatggcaagccacaaggacaatgaagaaaagttttttcctcagagcggggttctcatctttgggaagcaaggctcagagaaaacaaatgtggacattgaaaaggtcatgattacagacgaagaggaaatcaggacaaccaatcccgtggctacggagcagtatggttctgtatctaccaacctccagagaggcaacagacaagcagctaccgcagatgtcaacacacaaggcgttcttccaggcatggtctggcaggacagagatgtgtaccttcaggggcccatctgggcaaagattccacacacggacggacattttcacccctctcccctcatgggtggattcggacttaaacaccctcctccacagattctcatcaagaacaccccggtacctgcgaatccttcgaccaccttcagtgcggcaaagtttgcttccttcatcacacagtactccacgggacaggtcagcgtggagatcgagtgggagctgcagaaggaaaacagcaaacgctggaatcccgaaattcagtacacttccaactacaacaagtctgttaatgtggactttactgtggacactaatggcgtgtattcagagcctcgccccattggcaccagatacctgactcgtaatctgtaa

SEQ ID NO: 280 - protein, 735 aa, Artificial Sequence
  Synthetic polypeptide
MAADGYLPDWLEDTLSEGIRQWWKLKPGPPPPKPAERHRDDSRGLVLPGYKYLGPFNGLDKGEPVNEADAAALEHDKAYDRQLDSGDNPYLKYNHADAEFQERLKEDTSFGGNLGRAVFQAKKRVLEPLGLVGEPVKTAPGKKRPVEHSPVEPDSSSGTGKAGQQPARKRLNFGQTGDADSVPDPQPLGQPPAAPSGLGTNTMATGSGAPMADNNEGADGVGNSSGNWHCDSTWMGDRVITTSTRTWALPTYNNHLYKQISSQSGASNDSHYFGYSTPWGYFDFNRFHCHFSPRDWQRLINNNWGFRPKRLNFKLFNIQVKEVTQNDGTTTIANNLTSTVQVFTDSEYQLPYVLGSAHQGCLPPFPADVFMVPQYGYLTLNNGSQAVGRSSFYCLEYFPSQMLRTGNNFTFSYTFEDVPFHSSYAHSQSLDRLMNPLIDQYLYYLSTTNTPSGTTTQSRLQFSQAGASDIRDQSRNWLPGPCYRQQRVSKTSADNNNSEYSWTGATKYHLNGRDSLVNPGPAMASHKDNEEKFFPQSGVLIFGKQGSEKTNVDIEKVMITDEEEIRTTNPVATEQYGSVSTNLQRGNRQAATADVNTQGVLPGMVWQDRDVYLQGPIWAKIPHTDGHFHPSPLMGGFGLKHPPPQILIKNTPVPANPSTTFSAAKFASFITQYSTGQVSVEIEWELQKENSKRWNPEIQYTSNYNKSVNVDFTVDTNGVYSEPRPIGTRYLTRNL

SEQ ID NO: 281 - protein, 737 aa, Artificial Sequence
  Synthetic polypeptide
RMAADGYLPDWLEDNLSEGIREWWDLKPGAPKPKANQQKQDDGRGLVLPGYKYLGPFNGLDKGEPVNAADAAALEHDKAYDQQLKAGDNPYLRYNHADAEFQERLQEDTSFGGNLGRAVFQAKKRVLEPLGLVEEGAKTAPGKKRPVEQSPQEPDSSSGIGKTGQQPAKKRLNFGQTGDSESVPDPQPLGEPPATPAAVGPTTMASGGGAPMADNNEGADGVGNASGNWHCDSTWLGDRVITTSTRTWALPTYNNHLYKQISSTSTGASNDNHYFGYGTPWGYFDFNRFHCHFSPRDWQRLINNNWGFRPKRLNFKLFNIQVEEVTTNDGVTTIANNLTSTVQVFSDSEYQLPYVLGSAHQGCLPPFPADVFMIPQYGYLTLNNGSQAVGRSSFYCLEYFPSQMLRTGNNFTFSYTFEEVPFHSSYAHSQSLDRLMNPLIDQYLYYLNRTQNQSGSAQNKDLLFSRGSPAGMSVQPKNWLPGPCYRQQRVSKTKTDNNNSNFTWTGASKYNLNGRESIINPGTAVASHKDDEDKFFPMSGVMIFGKESAGASSTALDNVMITDEEEIKATNPVATERFGTVAVNFQSSSTDPATGDVHAMGALPGMVWQDRDVYLQGPIWAKIPHTDGHFHPSPLMGGFGLKNPPPQILIKNTPVPANPPAEFSATKFASFITQYSTGQVSVEIEWELQKENSKRWNPEVQYTSNYAKSANVDFTVDNNGLYTEPRPIGTRYLTRPL

SEQ ID NO: 282 - protein, 736 aa, Artificial Sequence
  Synthetic polypeptide
MAADGYLPDWLEDNLSEGIREWWDLKPGAPKPKANQQKQDDGRGLVLPGYKYLGPFNGLDKGEPVNAADAAALEHDKAYDQQLKAGDNPYLRYNHADAEFQERLQEDTSFGGNLGRAVFQAKKRVLEPLGLVEEGAKTAPGKKRPVEQSPQEPDSSSGIGKTGQQPAKKRLNFGQTGDSESVPDPQPLGEPPATPAAVGPTTMASGGGAPMADNNEGADGVGNASGNWHCDSTWLGDRVITTSTRTWALPTYNNHLYKQISSTSTGASNDNHYFGYGTPWGYFDFNRFHCHFSPRDWQRLINNNWGFRPKRLNFKLFNIQVEEVTTNDGVTTIANNLTSTVQVFSDSEYQLPYVLGSAHQGCLPPFPADVFMIPQYGYLTLNNGSQAVGRSSFYCLEYFPSQMLRTGNNFTFSYTFEEVPFHSSYAHSQSLDRLMNPLIDQYLYYLNRTQNQSGSAQNKDLLFSRGSPAGMSVQPKNWLPGPCYRQQRVSKTKTDNNNSNFTWTGASKYNLNGRESIINPGTAVASHKDDEDKFFPMSGVMIFGKESAGASSTALDNVMITDEEEIKATNPVATERFGTVAVNFQSSSTDPATGDVHAMGALPGMVWQDRDVYLQGPIWAKIPHTDGHFHPSPLMGGFGLKNPPPQILIKNTPVPANPPAEFSATKFASFITQYSTGQVSVEIEWELQKENSKRWNPEVQYTSNYAKSANVDFTVDNNGLYTEPRPIGTRYLTRPL

SEQ ID NO: 283 - DNA, 2211 bp, Artificial Sequence
  Synthetic polynucleotide
atggctgccgatggttatcttccagattggctcgaggacaacctctctgagggcattcgcgagtggtgggacttgaaacctggagccccgaagcccaaagccaaccagcaaaagcaggacgacggccggggtctggtgcttcctggctacaagtacctcggacccttcaacggactcgacaagggggagcccgtcaacgcggcggacgcagcggccctcgagcacgacaaggcctacgaccagcagctcaaagcgggtgacaatccgtacctgcggtataaccacgccgacgccgagtttcaggagcgtctgcaagaagatacgtcttttgggggcaacctcgggcgagcagtcttccaggccaagaagcgggttctcgaacctctcggtctggttgaggaaggcgctaagacggctcctggaaagaaacgtccggtagagcagtcgccacaagagccagactcctcctcgggcatcggcaagacaggccagcagcccgctaaaaagagactcaattttggccagactggcgactcagagtcagtccccgatccacaacctctcggagaacctccagcaacccccgctgctgtgggacctactacaatggcttcaggcggtggcgcaccaatggcagacaataacgaaggcgccgacggagtgggtaatgcctcaggaaattggcattgcgattccacatggctgggcgacagagtcatcaccaccagcacccgcacctgggccttgcccacctacaataaccacctctacaagcaaatctccagtacttcaacgggggccagcaacgacaaccactacttcggctacggcaccccctgggggtattttgatttcaacagattccactgccacttttcaccacgtgactggcagcgactcatcaacaacaattggggattccggcccaagagactcaacttcaaactcttcaacatccaagtcgaggaggtcacgacgaatgatggcgtcacaaccatcgctaataaccttaccagcacggttcaagtcttctcggactcggagtaccagcttccgtacgtcctcggctctgcgcaccagggctgcctccctccgttcccggcggacgtgttcatgattccgcaatacggctacctgacgctcaacaatggcagccaagccgtgggacgttcatccttttactgcctggaatatttcccttctcagatgctgagaacgggcaacaactttaccttcagctacacctttgaggaagtgcctttccacagcagctacgcgcacagccagagcctggaccggctgatgaatcctctcatcgaccaatacctgtattacctgaacagaacacaaaatcagtccggaagtgcccaaaacaaggacttgctgtttagccgtgggtctccagctggcatgtctgttcagcccaaaaactggctacctggaccctgttatcggcagcagcgcgtttctaaaacaaaaacagacaacaacaacagcaattttacctggactggtgcttcaaaatataacctcaatgggcgtgaatccatcatcaaccctggcaccgctgtggcctcacacaaagacgacgaagacaagttctttcccatgagcggtgtcatgatttttggaaaagagagcgccggagcttcaagcactgcattggacaatgtcatgattacagacgaagaggaaattaaagccactaaccctgtggccaccgaaagatttgggaccgtggcagtcaatttccagagcagcagcacagaccctgcgaccggagatgtgcatgctatgggagcattacctggcatggtgtggcaagatagagacgtgtacctgcagggtcccatttgggccaaaattcctcacacagatggacactttcacccgtctcctcttatgggcggctttggactcaagaacccgcctcctcagatcctcatcaaaaacacgcctgttcctgcgaatcctccggcggagttttcagctacaaagtttgcttcattcatcacccaatactccacaggacaagtgagtgtggaaattgaatgggagctgcagaaagaaaacagcaagcgctggaatcccgaagtgcagtacacatccaattatgcaaaatctgccaacgttgattttactgtggacaacaatggactttatactgagcctcgccccattggcacccgttaccttacccgtcccctgtaa

SEQ ID NO: 284 - protein, 737 aa, Artificial Sequence
  Synthetic polypeptide
RMAADGYLPDWLEDNLSEGIREWWDLKPGAPKPKANQQKQDDGRGLVLPGYKYLGPFNGLDKGEPVNAADAAALEHDKAYDQQLKAGDNPYLRYNHADAEFQERLQEDTSFGGNLGRAVFQAKKRVLEPLGLVEEGAKTAPGKKRPVEQSPQEPDSSSGIGKTGQQPAKKRLNFGQTGDSESVPDPQPLGEPPATPAAVGPTTMASGGGAPMADNNEGADGVGNASGNWHCDSTWLGDRVITTSTRTWALPTYNNHLYKQISSTSTGASNDNHYFGYSTPWGYFDFNRFHCHFSPRDWQRLINNNWGFRPKRLNFKLFNIQVEEVTTNDGVTTIANNLTSTVQVFSDSEYQLPYVLGSAHQGCLPPFPADVFMIPQYGYLTLNNGSQAVGRSSFYCLEYFPSQMLRTGNNFTFSYTFEEVPFHSSYAHSQSLDRLMNPLIDQYLYYLNRTQNQSGSAQNKDLLFSRGSPAGMSVQPKNWLPGPCYRQQRVSKTKTDNNNSNFTWTGASKYNLNGRESIINPGTAVASHKDDEDKFFPMSGVMIFGKESAGASSTALDNVMITDEEEIKATNPVATERFGTVAVNFQSSSTDPATGDVHAMGALPGMVWQDRDVYLQGPIWAKIPHTDGHFHPSPLMGGFGLKNPPPQILIKNTPVPANPPAEFSATKFASFITQYSTGQVSVEIEWELQKENSKRWNPEVQYTSNYAKSANVDFTVDNNGLYTEPRPIGTRYLTRPL

SEQ ID NO: 285 - protein, 737 aa, Artificial Sequence
  Synthetic polypeptide
RMAADGYLPDWLEDNLSEGIREWWDLKPGAPKPKANQQKQDDGRGLVLPGYKYLGPFNGLDKGEPVNAADAAALEHDKAYDQQLKAGDNPYLRYNHADAEFQERLQEDTSFGGNLGRAVFQAKKRVLEPLGLVEEGAKTAPGKKRPVEQSPQEPDSSSGIGKTGQQPAKKRLNFGQTGDSESVPDPQPLGEPPATPAAVGPTTMASGGGAPMADNNEGADGVGNASGNWHCDSTWLGDRVITTSTRTWALPTYNNHLYKQISSTSTGASNDNHYFGYSTPWGYFDFNRFHCHFSPRDWQRLINNNWGFRPKRLNFKLFNIQVKEVTTNDGVTTIANNLTSTVQVFSDSEYQLPYVLGSAHQGCLPPFPADVFMIPQYGYLTLNNGSQAVGRSSFYCLEYFPSQMLRTGNNFTFSYTFEEVPFHSSYAHSQSLDRLMNPLIDQYLYYLNRTQNQSGSAQNKDLLFSRGSPAGMSVQPKNWLPGPCYRQQRVSKTKTDNNNSNFTWTGASKYNLNGRESIINPGTAVASHKDDEDKFFPMSGVMIFGKESAGASSTALDNVMITDEEEIKATNPVATERFGTVAVNFQSSSTDPATGDVHAMGALPGMVWQDRDVYLQGPIWAKIPHTDGHFHPSPLMGGFGLKNPPPQILIKNTPVPANPPAEFSATKFASFITQYSTGQVSVEIEWELQKENSKRWNPEVQYTSNYAKSANVDFTVDNNGLYTEPRPIGTRYLTRPL

SEQ ID NO: 286 - protein, 737 aa, Artificial Sequence
  Synthetic polypeptide
RMAADGYLPDWLEDNLSEGIREWWDLKPGAPKPKANQQKQDDGRGLVLPGYKYLGPFNGLDKGEPVNAADAAALEHDKAYDQQLKAGDNPYLRYNHADAEFQERLQEDTSFGGNLGRAVFQAKKRVLEPLGLVEEGAKTAPGKKRPVEQSPQEPDSSSGIGKTGQQPAKKRLNFGQTGDSESVPDPQPLGEPPATPAAVGPTTMASGGGAPMADNNEGADGVGNASGNWHCDSTWLGDRVITTSTRTWALPTYNNHLYKQISSTSTGASNDNHYFGYSTPWGYFDFNRFHCHFSPRDWQRLINNNWGFRPKRLNFKLFNIQVKEVTTNDGVTTIANNLTSTVQVFSDSEYQLPYVLGSAHQGCLPPFPADVFMIPQYGYLTLNNGSQAVGRSSFYCLEYFPSQMLRTGNNFTFSYTFEEVPFHSSYAHSQSLDRLMNPLIDQYLYYLNRTQNQSGSAQNKDLLFSRGSPAGMSVQPKNWLPGPCYRQQRVSKTKTDNNNSNFTWTGASKYNLNGRESIINPGTAVASHKDDEDKFFPMSGVMIFGKESAGANSTALDNVMITDEEEIKATNPVATERFGTVAVNFQSSSTDPATGDVHAMGALPGMVWQDRDVYLQGPIWAKIPHTDGHFHPSPLMGGFGLKNPPPQILIKNTPVPANPPAEFSATKFASFITQYSTGQVSVEIEWELQKENSKRWNPEVQYTSNYAKSANVDFTVDNNGLYTEPRPIGTRYLTRPL

SEQ ID NO: 287 - DNA, 2208 bp, Artificial Sequence
  Synthetic polynucleotide
atggctgccgatggttatcttccagattggctcaaggacactctctctgaaggaataagacagtggtggaagctcaaacctggcccaccaccaccaaagcccgcagagcggcataaggacgacagcgggggtcttgtgcttcctgggtacaagtacctcggacccttcaacggactcgacaagggagagccggtcaacgaggcagacgccgcggccctcgagtacgacaaggcctacgaccggcagctcgacagcggagacaacccgtacctcaagtacaaccacgccgacgcggagtttcaggagcgccttaaagaagatacgtcttttgggggcaacctcggacgagcagtcttccaggcgaaaaagagggttcttgaacctctgggcctggttgaggaacctgttaagacggctccgggaaaaaagaggccggtagagcactctcctgtggagccagactcctcctcgggaacaggaaaagcgggccagcagcctgcgagaaagagattgaattttggtcagactggagacgcagactccgtacctgacccccagcctctcggacagccaccagcagccccctctggtctgggaactaatacgatggctacaggcagtggcgcaccaatggcagacaataacgagggcgccgacggagtgggtaattcctcgggaagttggcattgcgattccacatggatgggcgacagagtcatcaccaccagcacccgaacctgggctctgcccacctacaacaaccatctgtacaagcagatctccagccaatcaggagccagcaacgacaaccactactttggctacagcaccccttgggggtattttgacttcaacagattccactgccacttttcaccacgtgactggcaaagactcatcaacaacaactggggattccggcccaagagactcaacttcaagctctttaacattcaagtcaaggaggtcacgcagaatgacggtacgacgacgattgccaataaccttaccagcacggttcaggtgtttactgactcggagtaccagctcccgtacgtccccggctcggcgcatcaaggatgcctcccgccgttcccagcagacgtcttcatggtgccacagtatggatacctcaccctgaacaacgggagtcaggcagtaggacgctcttcattttactgcctggagtactttccttctcagatgcttcgtaccggaaacaactttaccttcagctacacctttgaggatgttcctttccacagcagctacgctcacagccagagtttggaccgtctcatgaatcctctcatcgaccagtacctgtattacttgagcagaacaaacactccaagcggaaccaccacgcagtccaggcttcagttttctcaggccggagcaagtgacattcgggaccagtctaggaactggcttcctggaccctgttaccgccagcagcgagtatcaaagacagctgcggacaacaacaacagtgaatactcgtggactggagctaccaagtaccacctcaatggcagagactctctggtgaatccgggcccggccatggccagccacaaggacgatgaagaaaagttttttcctcaaagcggggttctcatctttgggaagcaaggctcagagaaaacaaatgtggacattgaaaaggtcatgattacagacgaagaggaaatcagaaccaccaatcccgtggccacggagcagtatggttctgtatctaccaacctccagagcggcaacacacaagcagctactgcagatgtcaacacacaaggcgttcttccaggcatggtctggcaggacagagacgtgcacctgcaggggcctatctgggcaaagattccacacacggacggacattttcacccctctcccctcatgggcggatttggacttaaacaccctcctccacagattctcatcaagaacaccccggtacctgcaaatccttcgaccaccttcagtgcggcaaagtttgcttccttcatcacacagtattccacagggcaggtcagcgtggagatcgagtgggagctgcagaaggagaacagcaaacgctggaaccccgagatccagtacacttccaactacaacaaatctgttaatgtggactttactgtggacactaatggtgtgtattcagagcctcgccccattggcaccagatacctgactcgtaatctgtaa

SEQ ID NO: 288 - protein, 735 aa, Artificial Sequence
  Synthetic polypeptide
MAADGYLPDWLKDTLSEGIRQWWKLKPGPPPPKPAERHKDDSGGLVLPGYKYLGPFNGLDKGEPVNEADAAALEYDKAYDRQLDSGDNPYLKYNHADAEFQERLKEDTSFGGNLGRAVFQAKKRVLEPLGLVEEPVKTAPGKKRPVEHSPVEPDSSSGTGKAGQQPARKRLNFGQTGDADSVPDPQPLGQPPAAPSGLGTNTMATGSGAPMADNNEGADGVGNSSGSWHCDSTWMGDRVITTSTRTWALPTYNNHLYKQISSQSGASNDNHYFGYSTPWGYFDFNRFHCHFSPRDWQRLINNNWGFRPKRLNFKLFNIQVKEVTQNDGTTTIANNLTSTVQVFTDSEYQLPYVPGSAHQGCLPPFPADVFMVPQYGYLTLNNGSQAVGRSSFYCLEYFPSQMLRTGNNFTFSYTFEDVPFHSSYAHSQSLDRLMNPLIDQYLYYLSRTNTPSGTTTQSRLQFSQAGASDIRDQSRNWLPGPCYRQQRVSKTAADNNNSEYSWTGATKYHLNGRDSLVNPGPAMASHKDDEEKFFPQSGVLIFGKQGSEKTNVDIEKVMITDEEEIRTTNPVATEQYGSVSTNLQSGNTQAATADVNTQGVLPGMVWQDRDVHLQGPIWAKIPHTDGHFHPSPLMGGFGLKHPPPQILIKNTPVPANPSTTFSAAKFASFITQYSTGQVSVEIEWELQKENSKRWNPEIQYTSNYNKSVNVDFTVDTNGVYSEPRPIGTRYLTRNL

SEQ ID NO: 289 - DNA, 2208 bp, Artificial Sequence
  Synthetic polynucleotide
atggctgccgatggttatcttccagattggctcgaggacactctctctgaaggaataagacagtggtggaagctcaaacctggcccaccaccaccaaagcccgcagagcggcataaggacgacagcaggggtcttgtgcttcctgggtacaagtacctcggacccttcaacggactcgacaagggggagccggtcaacgaggcagacgccgcggccctcgagcacgacaaggcctacgaccggcagctcgacagcggagacaacccgtacctcaagtacaaccacgccgacgcagagtttcaggagcgccttaaagaagatacgtcttttgggggcaacctcggacgagcagtcttccaggcgaaaaagagggttcttgaacctctgggcctggttgaggaacctgttaagacggctccgggaaaaaagaggccggtagagcactctcctgtggagccagactcctcctcgggaaccggaaaagcgggccagcagcctgcaagaaaaagattaaattttggtcagactggagacgcagactccgtacctgacccccagcctctcggacagccaccagcagccccctctggtctgggatctactacaatggctacaggcagtggcgcaccaatggcagacaataacgagggtgccgatggagtgggtaattcctcaggaaattggcattgcgattcccaatggctgggcgacagagtcatcaccaccagcacccgaacctgggccctgcccacatacaacaaccacctctacaagcaaatctccagccaatcaggagccagcaacgacaaccactactttggctacagcaccccctgggggtattttgacttcaacagattccactgccacttttcaccacgtgactggcaaagactcatcaacaacaactggggattccggcccaaaagactcaacttcaagctctttaatattcaagtcaaagaggtcacgcagaatgacggtacgacgacgattgccaataaccttaccagcacggttcaggtgtttactgactcggagtaccagctcccgtacgtcctgggctcggcgcatcaaggatgcctcccgccgtttccagcggacgtcttcatggtcccacagtatggatacctcaccctgaacaacgggagtcaggcggtaggacgctcttccttttactgcctggagtactttccttctcagatgctgcgtactggaaacaactttcagttcagctacacttttgaagacgtgcctttccacagcagctacgctcacagccagagtctggatcggctgatgaatcctctgatcgaccagtacctgtattatctgaacaagacacaaacaaatagtggaactcttcagcagtctcggctactgtttagccaagctggaccaaccaacatgtctcttcaagctaaaaactggctgcctggaccttgctacagacagcagcgtctgtcaaaacaggcaaacgacaacaacaacagcaactttccctggactgcagctacaaagtatcatctaaatggccgggactcgttggttaatccaggaccagctatggccagtcgcaaggatgacgaagaaaagtttttccccatgcatggaaccctgatatttggtaaacaaggaacaaatgccaacgacgcggatttggaaaatgtcatgattacagatgaagaagaaatcagggccaccaatcccgtggctacggagcagtacgggactgtgtcaaataatttgcaaaactcaaacactggtccaactactggaactgtcaatcaccaaggagcgttacctggtatggtgtggcaggatcgagacgtgtacctgcagggacccatttgggccaagattcctcacaccgatggacactttcatccttctccactgatgggaggttttggactcaaacacccgcctcctcagatcatgatcaaaaacactcccgttccagccaatcctcccacaaacttcagttctgccaagtttgcttctttcatcacacagtattccacgggacaggtcagcgtggagatcgagtgggagctgcagaaggagaacagcaaacgctggaatcccgaaattcagtacacttccaactacaacaagtctgttaatgtggactttactgtggacactaatggtgtgtattcagagcctcgccccattggcaccagatacctgactcgtaatctgtaa

SEQ ID NO: 290 - protein, 735 aa, Artificial Sequence
  Synthetic polypeptide
MAADGYLPDWLEDTLSEGIRQWWKLKPGPPPPKPAERHKDDSRGLVLPGYKYLGPFNGLDKGEPVNEADAAALEHDKAYDRQLDSGDNPYLKYNHADAEFQERLKEDTSFGGNLGRAVFQAKKRVLEPLGLVEEPVKTAPGKKRPVEHSPVEPDSSSGTGKAGQQPARKRLNFGQTGDADSVPDPQPLGQPPAAPSGLGSTTMATGSGAPMADNNEGADGVGNSSGNWHCDSQWLGDRVITTSTRTWALPTYNNHLYKQISSQSGASNDNHYFGYSTPWGYFDFNRFHCHFSPRDWQRLINNNWGFRPKRLNFKLFNIQVKEVTQNDGTTTIANNLTSTVQVFTDSEYQLPYVLGSAHQGCLPPFPADVFMVPQYGYLTLNNGSQAVGRSSFYCLEYFPSQMLRTGNNFQFSYTFEDVPFHSSYAHSQSLDRLMNPLIDQYLYYLNKTQTNSGTLQQSRLLFSQAGPTNMSLQAKNWLPGPCYRQQRLSKQANDNNNSNFPWTAATKYHLNGRDSLVNPGPAMASRKDDEEKFFPMHGTLIFGKQGTNANDADLENVMITDEEEIRATNPVATEQYGTVSNNLQNSNTGPTTGTVNHQGALPGMVWQDRDVYLQGPIWAKIPHTDGHFHPSPLMGGFGLKHPPPQIMIKNTPVPANPPTNFSSAKFASFITQYSTGQVSVEIEWELQKENSKRWNPEIQYTSNYNKSVNVDFTVDTNGVYSEPRPIGTRYLTRNL

SEQ ID NO: 291 - DNA, 2208 bp, Artificial Sequence
  Synthetic polynucleotide
atggctgccgatggttatcttccagattggctcgaggacactctctctgaaggaataagacagtggtggaagctcaaacctggcccaccaccaccaaagcccgcagagcggcataaggacgacagcaggggtcttgtgcttcctgggtacaagtacctcggacccttcaacggactcgacaagggagagccggtcaacgaggcagacgccgcggccctcgagcacgacaaagcctacgaccggcagctcgacagcggagacaacccgtacctcaagtacaaccacgccgacgcggagtttcaggagcgccttaaagaagatacgtcttttgggggcaacctcggacgagcagtcttccaggcgaaaaagagggttcttgaacctctgggcctggttggggaacctgtcaagacggctccaggaaaaaagaggccggtagagcactctcctgtggagccagactcctcctcgggaaccggaaaggcgggccagcagcctgcaagaaaaagattgaattttggtcagactggagacgcagactcagtacctgacccccagcctctcggacagccaccagcagccccctctggtctgggaactaatacgatggctacaggcagtggcgcaccaatggcagacaataacgagggcgccgacggagtgggtaattcctcgggaaattggcattgcgattccacatggatgggcgacagagtcatcaccaccagcacccgaacctgggccctgcccacctacaacaaccacctctacaaacaaatttccagccaatcaggagcctcgaacgacaatcactactttggctacagcaccccttgggggtattttgacttcaacagattccactgccacttttcaccacgtgactggcaaagactcatcaacaacaactggggattccgacccaagagactcaacttcaagctctttaacattcaagtcaaagaggtcacgcagaatgacggtacgacgacgattgccaataaccttaccagcacggttcaggtgtttactgactcggagtaccagctcccgtacgtcctcggctcggcgcatcaaggatgcctcccgccgttcccagcagacgtcttcatggtgccacagtatggatacctcaccctgaacaacgggagtcaggcagtaggacgctcttcattttactgcctggagtactttccttctcagatgctgcgtaccggaaacaactttaccttcagctacacttttgaggacgttcctttccacagcggctacgctcacagccagagtctggaccgtctcatgaatcctctcatcgaccagtacctgtattacttgagcacaacaaacactccaagtggaaccaccacgcagtcaaggcttcagttttctcaggccggagcgagtgacattcgggaccagtctaggaactggcttcctggaccctgttaccgccagcagcgagtatcaaagacatctgcggataacaacaacagtgaatactcgtggactggagctaccaagtaccacctcaatggcagagactctctggtgaatccgggcccggccatggcaagccacaaggacaatgaagaaaagttttttcctcagagcggggttctcatctttgggaagcaaggctcagagaaaacaaatgtggacattgaaaaggtcatgattacagacgaagaggaaatcaggacaaccaatcccgtggctacggagcagtacggttctgtatctaccaacctccagagaggcaacagacaagcagctaccgcagatgtcaacacacaaggcgttcttccaggcatggtctggcaggacagagatgtgtaccttcaggggcccatctgggcaaagattccacacacggacggacattttcacccctctcccctcatgggtggattcggacttaaacaccctcctccacagattctcatcaagaacaccccggtacctgcgaatccttcgaccaccttcagtgcggcaaagtttgcttccttcatcacacagtactccacgggacaggtcagcgtggagatcgagtgggagctgcagaaggaaaacagcaaacgctggaatcccgaaattcagtacacttccaactacaacaagtctgttaatgtggactttactgtggacactaatggcgtgtattcagagcctcgccccattggcaccagatacctgactcgtaatctgtaa

SEQ ID NO: 292 - protein, 735 aa, Artificial Sequence
  Synthetic polypeptide
MAADGYLPDWLEDTLSEGIRQWWKLKPGPPPPKPAERHKDDSRGLVLPGYKYLGPFNGLDKGEPVNEADAAALEHDKAYDRQLDSGDNPYLKYNHADAEFQERLKEDTSFGGNLGRAVFQAKKRVLEPLGLVGEPVKTAPGKKRPVEHSPVEPDSSSGTGKAGQQPARKRLNFGQTGDADSVPDPQPLGQPPAAPSGLGTNTMATGSGAPMADNNEGADGVGNSSGNWHCDSTWMGDRVITTSTRTWALPTYNNHLYKQISSQSGASNDNHYFGYSTPWGYFDFNRFHCHFSPRDWQRLINNNWGFRPKRLNFKLFNIQVKEVTQNDGTTTIANNLTSTVQVFTDSEYQLPYVLGSAHQGCLPPFPADVFMVPQYGYLTLNNGSQAVGRSSFYCLEYFPSQMLRTGNNFTFSYTFEDVPFHSGYAHSQSLDRLMNPLIDQYLYYLSTTNTPSGTTTQSRLQFSQAGASDIRDQSRNWLPGPCYRQQRVSKTSADNNNSEYSWTGATKYHLNGRDSLVNPGPAMASHKDNEEKFFPQSGVLIFGKQGSEKTNVDIEKVMITDEEEIRTTNPVATEQYGSVSTNLQRGNRQAATADVNTQGVLPGMVWQDRDVYLQGPIWAKIPHTDGHFHPSPLMGGFGLKHPPPQILIKNTPVPANPSTTFSAAKFASFITQYSTGQVSVEIEWELQKENSKRWNPEIQYTSNYNKSVNVDFTVDTNGVYSEPRPIGTRYLTRNL

SEQ ID NO: 293 - DNA, 2208 bp, Artificial Sequence
  Synthetic polynucleotide
atggctgccgatggttatcttccagattggctcgaggacactctctctgaaggaataagacagtggtggaagctcaaacctggcccaccaccaccaaagcccgcagagcggcataaggacgacagcaggggtcttgtgcttcctgggtacaagtacctcggacccttcaacggactcgacaagggagagccggtcaacgaggcagacgccgcggccctcgagcacgacaaagcctacgaccggcagctcgacagcggagacaacccgtacctcaagtacaaccacgccgacgcggagtttcaggagcgccttaaagaagatacgtcttttgggggcaacctcggacgagcagtcttccaggcgaaaaagagggttcttgaacctctgggcctggttggggaacctgttaagacggctccgggaaaaaagaggccggtagagcactctcctgtggagccagactcctcctcgggaaccggaaaggcgggccagcagcctgcaagaaaaagattgaattttggtcagactggagacgcagactcagtacctgacccccagcctctcggacagccaccagcagccccctctggtctgggaactaatacgatggctacaggcagtggcgcaccaatggcagacaataacgagggcgccgacggagtgggtaattcctcgggaaatcggcattgcgattccacatggatgggcgacagagtcatcaccaccagcacccgaacctgggccctgcccacctacaacaaccacctctacagacaaatttccagccaatcaggagcctcgaacgacaatcactactttggctacagcaccccttgggggtattttgacttcaacagattccactgccacttttcaccacgtgactggcaaagactcatcaacaacaactggggattccgacccaagagactcaacttcaagctctttaacattcaagtcaaagaggtcacgcagaatgacggtacgacgacgattgccaataaccttaccagcacggttcaggtgtttactgactcggagtaccagctcccgtacgtcctcggctcggcgcatcaaggatgcctcccgccgttcccagcagacgtcttcatggtgccacagtatggatacctcaccctgagcaacgggagtcaggcagtaggacgctcttcattttactgcccggagtactttccttctcagatgctgcgtaccggaaacaactttaccttcagctacacttttgaggacgttcctttccacagcagctacgctcacagccagagtctggaccgtctcatgaatcctctcatcgaccagtacctgtattacttgagcacaacaaacactccaagtggaaccaccacgcagtcaaggcttcagttttctcaggccggagcgagtgacattcgggaccagtctaggaactggcttcctggaccctgttaccgccagcagcgagtatcaaagacatctgcggataacaacaacagtgaatactcgtggactggagctaccaagtaccacctcaatggcagagactctctggtgaatccgggcccggccatggcaagccacaaggacaatgaagaaaagttttttcctcagagcggggttctcatctttgggaagcaaggctcagagaaaacaaatgtggacattgaaaaggtcatgattacagacgaagaggaaatcaggacaaccaatcccgtggctacggagcagtatggttctgtatctaccaacctccagagaggcaacagacaagcagctaccgcagatgtcaacacacaaggcgttcttccaggcatggtctggcaggacagagatgtgtaccttcaggggcccatctgggcaaagattccacacacggacggacattttcacccctctcccctcatgggtggattcggacctaaacaccctcctccacagattctcatcaagaacaccccggtacctgcgaatccttcgaccaccttcagtgcggcaaagtttgcttccttcatcacacagtactccacgggacaggtcagcgtggagatcgagtgggagctgcagaaggaaaacagcaaacgctggaatcccgaaattcagtacacttccaactacaacaagtctgttaatgtggactttactgtggacactaatggcgtgtattcagagcctcgccccattggcaccagatacctgactcgtaatttgtaa

SEQ ID NO: 294 - protein, 735 aa, Artificial Sequence
  Synthetic polypeptide
MAADGYLPDWLEDTLSEGIRQWWKLKPGPPPPKPAERHKDDSRGLVLPGYKYLGPFNGLDKGEPVNEADAAALEHDKAYDRQLDSGDNPYLKYNHADAEFQERLKEDTSFGGNLGRAVFQAKKRVLEPLGLVGEPVKTAPGKKRPVEHSPVEPDSSSGTGKAGQQPARKRLNFGQTGDADSVPDPQPLGQPPAAPSGLGTNTMATGSGAPMADNNEGADGVGNSSGNRHCDSTWMGDRVITTSTRTWALPTYNNHLYRQISSQSGASNDNHYFGYSTPWGYFDFNRFHCHFSPRDWQRLINNNWGFRPKRLNFKLFNIQVKEVTQNDGTTTIANNLTSTVQVFTDSEYQLPYVLGSAHQGCLPPFPADVFMVPQYGYLTLSNGSQAVGRSSFYCPEYFPSQMLRTGNNFTFSYTFEDVPFHSSYAHSQSLDRLMNPLIDQYLYYLSTTNTPSGTTTQSRLQFSQAGASDIRDQSRNWLPGPCYRQQRVSKTSADNNNSEYSWTGATKYHLNGRDSLVNPGPAMASHKDNEEKFFPQSGVLIFGKQGSEKTNVDIEKVMITDEEEIRTTNPVATEQYGSVSTNLQRGNRQAATADVNTQGVLPGMVWQDRDVYLQGPIWAKIPHTDGHFHPSPLMGGFGPKHPPPQILIKNTPVPANPSTTFSAAKFASFITQYSTGQVSVEIEWELQKENSKRWNPEIQYTSNYNKSVNVDFTVDTNGVYSEPRPIGTRYLTRNL

SEQ ID NO: 295 - DNA, 2205 bp, Artificial Sequence
  Synthetic polynucleotide
atggctgccgatggttatcttccagattggctcgaggacactctctctgaaggaataagacagtggtggaagctcaaacctggcccaccaccaccaaagcccgcagagcggcataaggacgacagcaggggtcttgtgcttcctgggtacaagtacctcggacccttcaacggactcgacaagggagagccggtcaacgaggcagacgccgcggccctcgagcacgacaaggcctacgaccggcagctcgacagcggagacaacccgtacctcaagtacaaccacgccgacgcggagtttcaggagcgtcttaaagaagatacgtcttttgggggcaacctcggacgagcagtcttccaggcgaaaaagagggttcttgaacctctgggcctggttgaggaacctgttaagacggctccgggaaaaaagaggccggtagagcactctcctgcggagccagactcctcctcgggaaccggaaaagcgggccagcagcctgcaagaaaaagactgaatttcggtcagactggagacgcagactccgtacctgacccccagcctctcagacagccaccagcagcccccacaagtttgggatctactacaatggctacaggcagtggcgcaccaatggcagacaataacgagggtgccgatggagtgggtaattcctcaggaaattggcattgcgattcccaatggctgggcgacagagtcatcaccaccagcacccgaacctgggccctgcccacctacaacaaccacctttacaagcaaatctccagccaatcaggagcctcaaacgacaaccactactttggctacagcaccccctgggggtattttgacttcaacagattccactgccacttttcaccacgtgactggcaaagactcatcaacaacaactggggattccgacccaagagactcaacttcaagctctttaacattcaagtcaaagaggtcacgcagaatgacggtacgacgacgattgccaataaccttaccagcacggttcaggtgtttactgactcggagtaccagctcccgtacgtcctcggctcggcgcatcaaggatgcctcccgccgtttccagcggacgtcttcatggtcccacagtatggatacctcaccctgaacaacgggagtcaggcggtaggacgctcttccttttactgcctggagtactttccttctcagatgctgcgtactggaaacaactttcagttcagctacacttttgaagacgtgcctttccacagcagctacgctcacagccagagtttggatcggctgatgaatcctctgatcgaccagtacctgtattatctaaacagaacacaaacagctagtggaactcagcagtctcggctactgtttagccaagctggacccacaagcatgtctcttcaagctaaaaactggctgcctggaccgtgttatcgccagcagcgtttgtcaaagcaggcaaacgacaacaacaacagcaactttccctggactggagctaccaagtactacctcaatggcagagactctttggtgaacccgggcccggccatggccagccacaaggacgatgaagaaaagtttttccccatgcatggaaccctaatatttggtaaagaaggaacaaatgctaccaacgcggaattggaaaatgtcatgattacagatgaagaggaaatcaggaccaccaatcccgtggctacagagcagtacggatatgtgtcaaataatttgcaaaactcaaatactgctgcaagtactgaaactgtgaatcaccaaggagcattacctggtatggtgtggcaggatcgagacgtgtacctgcagggacccatttgggccaagattcctcacaccgatggacactttcatccttctccactgatgggaggttttggactcaaacacccgcctcctcagattatgatcaaaaacactcccgttccagccaatcctcccacaaacttcagttctgccaagtttgcttccttcatcacacagtattccacgggacaggtcagcgtggagatcgagtgggagctgcagaaggagaacagcaaacgctggaatcccgaaattcagtacacttccaactacaacaaatctgttaatgtggactttactgtggacactaatggtgtgtattcagagcctcgccccattggcaccagatacctgactcgtaatctgtaa

SEQ ID NO: 296 - protein, 734 aa, Artificial Sequence
  Synthetic polypeptide
MAADGYLPDWLEDTLSEGIRQWWKLKPGPPPPKPAERHKDDSRGLVLPGYKYLGPFNGLDKGEPVNEADAAALEHDKAYDRQLDSGDNPYLKYNHADAEFQERLKEDTSFGGNLGRAVFQAKKRVLEPLGLVEEPVKTAPGKKRPVEHSPAEPDSSSGTGKAGQQPARKRLNFGQTGDADSVPDPQPLRQPPAAPTSLGSTTMATGSGAPMADNNEGADGVGNSSGNWHCDSQWLGDRVITTSTRTWALPTYNNHLYKQISSQSGASNDNHYFGYSTPWGYFDFNRFHCHFSPRDWQRLINNNWGFRPKRLNFKLFNIQVKEVTQNDGTTTIANNLTSTVQVFTDSEYQLPYVLGSAHQGCLPPFPADVFMVPQYGYLTLNNGSQAVGRSSFYCLEYFPSQMLRTGNNFQFSYTFEDVPFHSSYAHSQSLDRLMNPLIDQYLYYLNRTQTASGTQQSRLLFSQAGPTSMSLQAKNWLPGPCYRQQRLSKQANDNNNSNFPWTGATKYYLNGRDSLVNPGPAMASHKDDEEKFFPMHGTLIFGKEGTNATNAELENVMITDEEEIRTTNPVATEQYGYVSNNLQNSNTAASTETVNHQGALPGMVWQDRDVYLQGPIWAKIPHTDGHFHPSPLMGGFGLKHPPPQIMIKNTPVPANPPTNFSSAKFASFITQYSTGQVSVEIEWELQKENSKRWNPEIQYTSNYNKSVNVDFTVDTNGVYSEPRPIGTRYLTRNL

SEQ ID NO: 297 - DNA, 3160 bp, Artificial Sequence
  Synthetic polynucleotide
acccttcactaaagggactagtcctgcaggtttaaacgaattcgcccttgctgcgtcaactggaccaatgagaactttcccttcaacgactgtgtcgacaagatggtgatttggtgggaggaggggaagatgaccgccaaggtcgtggagtcggccaaagccattctcggaggaagcaaggtgcgcgtggaccagaaatgcaagtcctcggcccagatagatccgactcccgtgatcgtcacctccaacaccaacatgtgcgccgtgattgacgggaactcaacgaccttcgaacaccagcagccgttgcaagaccggatgttcaaatttgaactcacccgccgtctggatcatgactttgggaaggtcaccaagcgggaagtcaaagactttttccggtgggcaaaggatcacgtggttgaggtggagcatgaattctacgtcaaaaagggtggagccaagaaaagacccgcccctagtgacgcagatataagtgagcccaaacgggtgcgcgagtcagttgcgcagccatcgacgtcagacgcggaagcttcgatcaactacgcggacaggtaccaaaacaaatgttctcgtcacgtgggcatgaatctgatgctgtttccctgcagacaatgcgagagaatgaatcaaaattcaaatatctgcttcactcacggacagaaagactgtttagagtgctttcccgtgtcagaatctcaacctgtttctgtcgtcaaaaaggcgtatcagaaactgtgctacattcatcatatcatgggaaaggtgccagacgcttgcactgcctgcgatctggtcaatgtggatttggatgactgcatctctgaacaataaatgatttaaatcaggtatggctgccgatggttatcttccagattggctcgaggacactctctctgaaggaataagacagtggtggaagctcaaacctggcccaccaccaccaaagcccgcagagcggcataaggacgacagcaggggtcttgtgcttcctgggtacaagtacctcggacccttcaacggactcgacaagggagagccggtcaacgaggcagacgccgcggccctcgagcacgacaaggcctacgaccggcagctcgacagcggagacaacccgtacctcaagtacaaccacgccgacgcggagtttcaggagcgtcttaaagaagatacgtcttttgggggcaacctcggacgagcagtcttccaggcgaaaaagagggttcttgaacctctgggcctggttgaggaacctgttaagacggctccgggaaaaaagaggccggtagagcactctcctgcggagccagactcctcctcgggaaccggaaaagcgggccagcagcctgcaagaaaaagactgaatttcggtcagactggagacgcagactccgtacctgacccccagcctctcagacagccaccagcagcccccacaagtttgggatctactacaatggctacaggcagtggcgcaccaatggcagacaataacgagggtgccgatggagtgggtaattcctcaggaaattggcattgcgattcccaatggctgggcgacagagtcatcaccaccagcacccgaacctgggccctgcccacctacaacaaccacctttacaagcaaatctccagccaatcaggagcctcaaacgacaaccactactttggctacagcaccccctgggggtattttgacttcaacagattccactgccacttttcaccacgtgactggcaaagactcatcaacaacaactggggattccgacccaagagactcaacttcaagctctttaacattcaagtcaaagaggtcacgcagaatgacggtacgacgacgattgccaataaccttaccagcacggttcaggtgtttactgactcggagtaccagctcccgtacgtcctcggctcggcgcatcaaggatgcctcccgccgtttccagcggacgtcttcatggtcccacagtatggatacctcaccctgaacaacgggagtcaggcggtaggacgctcttccttttactgcctggagtactttccttctcagatgctgcgtactggaaacaactttcagttcagctacacttttgaagacgtgcctttccacagcagctacgctcacagccagagtttggatcggctgatgaatcctctgatcgaccagtacctgtattatctaaacagaacacaaacagctagtggaactcagcagtctcggctactgtttagccaagctggacccacaagcatgtctcttcaagctaaaaactggctgcctggaccgtgttatcgccagcagcgtttgtcaaagcaggcaaacgacaacaacaacagcaactttccctggactggagctaccaagtactacctcaatggcagagactctttggtgaacccgggcccggccatggccagccacaaggacgatgaagaaaagtttttccccatgcatggaaccctaatatttggtaaagaaggaacaaatgctaccaacgcggaattggaaaatgtcatgattacagatgaagaggaaatcaggaccaccaatcccgtggctacagagcagtacggatatgtgtcaaataatttgcaaaactcaaatactgctgcaagtactgaaactgtgaatcaccaaggagcattacctggtatggtgtggcaggatcgagacgtgtacctgcagggacccatttgggccaagattcctcacaccgatggacactttcatccttctccactgatgggaggttttggactcaaacacccgcctcctcagattatgatcaaaaacactcccgttccagccaatcctcccacaaacttcagttctgccaagtttgcttccttcatcacacagtattccacgggacaggtcagcgtggagatcgagtgggagctgcagaaggagaacagcaaacgctggaatcccgaaattcagtacacttccaactacaacaaatctgttaatgtggactttactgtggacactaatggtgtgtattcagagcctcgccccattggcaccagatacctgactcgtaatctgtaattgcttgttaatcaataaaccgtttaattcgtttcagttgaactttggtctctgcgaagggcgaattcgcggccgctaaatcaatcg

SEQ ID NO: 298 - protein, 734 aa, Artificial Sequence
  Synthetic polypeptide
MAADGYLPDWLEDTLSEGIRQWWKLKPGPPPPKPAERHKDDSRGLVLPGYKYLGPFNGLDKGEPVNEADAAALEHDKAYDRQLDSGDNPYLKYNHADAEFQERLKEDTSFGGNLGRAVFQAKKRVLEPLGLVEEPVKTAPGKKRPVEHSPAEPDSSSGTGKAGQQPARKRLNFGQTGDADSVPDPQPLGQPPAAPTSLGSTTMATGSGAPMADNNEGADGVGNSSGNWHCDSQWLGDRVITTSTRTWALPTYNNHLYKQISSQSGASNDNHYFGYSTPWGYFDFNRFHCRFSPRDWQRLINNNWGFRPKRLNFKLFNIQVKEVTQNDGTTTIANNLTSTVQVFTDSEYQLPYVLGSAHQGCLPPFPADVFMVPQYGYLTLNNGSQAVGRSSFYCLEYFPSQMLRTGNNFQFSYTFEDVPFHSSYAHSQGLDRLMNPLIDQYLYYLNRTQTASGTQQSRLLFSQAGPTSMSLQAKNWLPGPCYRQQRLSKQANDNNNSNFPWTGATKYHLNGGDSLVNPGPAMASHKDDEEKFFPMHGTLIFGKEGTNATNAELENVMITDEEEIRTTNPVATEQYGYVSNNLQNSNTAASTETVNHQGALPGMVWQDRDVYLRGPIWAKIPHADGHFHPSPLMGGFGLKHPPPQIMIKNTPVPANPPTNFSSAKFASFITQYSTGQVSVEIEWELQKENSKRWNPEIQYTSNYNKSVNVDFTVDTNGVYSEPRPIGTRYLTRNL

SEQ ID NO: 299 - DNA, 3157 bp, Artificial Sequence
  Synthetic polynucleotide
ctcactaagggactagtcctgcaggtttaaacgaattcgcccttgctgcgtcaactggaccaatgagaactttcccttcaacgactgtgtcgacaagatggtgatttggtgggaggaggggaagatgaccgccaaggtcgtggagtcggccaaagccactctcggaggaagcaaggtgcgcgtggaccagaaacgcaagtcctcggcccagatagatccgactcccgtgatcgtcacctccaacaccaacatgtgcgccgtgattgacgggaactcaacgaccttcgaacaccagcagccgttgcaagaccgaatgttcaaatttgaactcacccgccgtctggatcatgacttcgggaaggtcaccaagcaggaagtcaaagactttttccggtgggcaaaggatcacgtggttgaggtggagcatgaattctacgtcaaaaagggtggagccaagaaaagacccgcccctagtgacgcagatataagtgagcccaaacgggtgcgcgagtcagttgcgcagccatcgacgtcagacgcggaagcttcgatcaactacgcggacaggtaccaaaacaaatgttctcgtcacgtgggcatgaatctgatgctgtttccctgcagacaatgcgagagaatgaatcaaaattcaaatatctgcttcactcacggacagaaagactgtttagagtgctttcccgtgtcagaatctcaacctgtttctgtcgtcaaaaaggcgtatcagaaactgtgctacattcatcatatcatgggaaaggtgccagacgcttgcactgcctgcgatctggtcaatgtggatttggatgactgcatctctgaacaataaatgatttaaatcaggtatggctgccgatggttatcttccagattggctcgaggacactctctctgaaggaataagacagtggtggaagctcaaacctggcccaccaccaccaaagcccgcagagcggcataaggacgacagcaggggtcttgtgcttcctgggtacaagtacctcggacccttcaacggactcgacaagggagagccggtcaacgaggcagacgccgcggctctcgagcacgacaaggcctacgaccggcagctcgacagcggagacaacccgtacctcaagtacaaccacgccgacgcggagtttcaggagcgtcttaaagaagatacgtcttttgggggcaacctcggacgagcagtcttccaggcgaaaaagagggttcttgaacctctgggcctggttgaggaacctgttaagacggctccgggaaaaaagaggccggtagagcactctcctgcggagccagactcctcctcgggaaccggaaaagcgggccagcagcctgcaagaaaaagactgaatttcggtcagactggagacgcagactccgtacctgacccccagcctctcggacagccaccagcagcccccacaagtttgggatctactacaatggctacaggcagtggcgcaccaatggcagacaataacgagggtgccgatggagtgggtaattcctcaggaaattggcattgcgattcccaatggctgggcgacagagtcatcaccaccagcacccgaacctgggccctgcccacctacaacaaccacctttacaagcaaatctccagccaatcaggagcctcaaacgacaaccactactttggctacagcaccccctgggggtattttgacttcaacagattccactgccgcttttcaccacgtgactggcaaagactcatcaacaacaactggggattccgacccaagagactcaacttcaagctctttaacattcaagtcaaagaggtcacgcagaatgacggtacgacgacgattgccaataaccttaccagcacggttcaggtgtttactgactcggagtaccagctcccgtacgtcctcggctcggcgcatcaaggatgcctcccgccgtttccagcggacgtcttcatggtcccacagtatggatacctcaccctgaacaacgggagtcaggcggtaggacgctcttccttttactgcctggagtactttccttctcagatgctgcgtactggaaacaactttcagttcagctacacttttgaagacgtgcctttccacagcagctacgctcacagccagggtttggatcggctgatgaatcctctgatcgaccagtacctgtattatctaaacagaacacaaacagctagtggaactcagcagtctcggctactgtttagccaagctggacccacaagcatgtctcttcaagctaaaaactggctgcctggaccgtgttatcgccagcagcgtttgtcaaagcaggcaaacgacaacaacaacagcaactttccctggactggagctaccaagtaccacctcaatggcggagactctttggtgaacccgggcccggccatggccagccacaaggacgatgaagaaaagtttttccccatgcatggaaccctaatatttggtaaagaaggaacaaatgctaccaacgcggaattggaaaatgtcatgattacagatgaagaggaaatcaggaccaccaatcccgtggctacagagcagtacggatatgtgtcaaataatttgcaaaactcaaatactgctgcaagtactgaaactgtgaatcaccaaggagcattacctggtatggtgtggcaggatcgagacgtgtacctgcggggacccatttgggccaagattcctcacgccgatggacactttcatccttctccactgatgggaggttttggactcaaacacccgcctcctcagattatgatcaaaaacactcccgttccagccaatcctcccacaaacttcagttctgccaagtttgcttccttcatcacacagtattccacgggacaggtcagcgtggagatcgagtgggagctgcagaaggagaacagcaaacgctggaatcccgaaattcagtacacttccaactacaacaaatctgttaatgtggactttactgtggacactaatggtgtgtattcagagcctcgccccattggcaccagatacctgactcgtaatctgtaattgcttgttaatcaataaaccgtttaattcgtttcagttgaactttggtctctgcgaagggcgaattcgcggccgctaaattcaattcg

SEQ ID NO: 300 - protein, 734 aa, Artificial Sequence
  Synthetic polypeptide
MAADGYLPDWLEDTLSEGIRQWWKLKPGPPPPKPAERHKDDSRGLVLPGYKYLGPFNGLDKGEPVNEADAAALEHDKAYDRQLDSGDNPYLKYNHADAEFQERLKEDTSFGGNLGRAVFQAKKRVLEPLGLVEEPVKTAPGKKRPVEHSPAEPDSSSGTGKAGQQPARKRLNFGQTGDADSVPDPQPLGQPPAAPTSLGSTTMATGSGAPMADNNEGADGVGNSSGNWHCDSQWLGDRVITTSTRTWALPTYNNHLYKQISSQSGASNDNHYFGYSTPWGYFDFNRFHCHFSPRDWQRLINNNWGFRPKRLNFKLFNIQVKEVTQNDGTTTIANNLTSTVQVFTDSEYQLPYVLGSAHQGCLPPFPADVFMVPQYGYLTLNNGSQAVGRSSFYCLECFPSQMLRTGNNFQFSYTFEDVPFHSSYAHSQSLDRLMNPLIDQYLYYLNRTQTASGTQQSRLLFSQAGPTSMSLQAKNWLPGPCYRQQRLSKQANDNNNSNFPWTGATKYHLNGRDSLVNPGPAMASHKDDEEKFFPMHGTLIFGKEGTNATNAELENVMITDEEEIRTTNPVATEQYGYVSNNLQNSNTAASTETVNHQGALPGMVWQDRDVYLQGPIWAKIPHTDGHFHPSPLMGGFGLKHPPPQIMIKNTPVPANPPTNFSSAKFASFITQYSTGQVSVEIEWELQKENSKRWNPEIQYTSNYNKSVNVDFTVDTNGVYSEPRPIGTRYLTRNL

SEQ ID NO: 301 - DNA, 2208 bp, Artificial Sequence
  Synthetic polynucleotide
atggctgccgatggttatcttccagattggctcgaggacactctctctgaaggaataagacagtggtggaagctcaaacctggcccaccaccaccaaagcccgcagagcggcataaggacgacagcaggggtcttgtgcttcctggatacaagtacctcggacccttcaacggactcgacaagggagagccggtcaacgaggcagacgccgcggccctcgagcacgacaaggcctacgaccggcagctcgacagcggagacaacccgtacctcaagtacaaccacgccgacgcggagtttcaggagcgccttaaagaagatacgtcttttgggggcaacctcggacgagcagtcttccaggcgaaaaagagggttcttgaacctctgggcctggttgaggaacctgttaagacggctccgggaaaaaagaggccggtagagcactctcctgtggagccagactcctcctcgggaaccggaaaagcgggcaaccagcctgcaagaaaaagattgaatttcggtcagactggagacgcagactccgtacctgacccccagcctctcggacagccaccagcatccccctctggtctgggaactaatacgatggctacaggcagtggcgcaccaatggcagacaataacgagggcgccgacggagtgggtaattcctcgggaaattggcattgcgattccacatggatgggcgacagagtcgtcaccaccagcacccgcacctgggccctgcccacctacaacaaccacctctacaagcagatttccagccaatcaggagccagcaacgacaaccactactttggctacagcaccccttgggggtattttgacttcaacagattccactgccacttttcgccacgcgactggcagagactcatcaacaacaactggggattccggcccaaaagactcaacttcaagctgtttaacattcaagtcaaggaggtcacgcagaatgacggtacgacgacgattgccaataaccttaccagcacggttcaggtgtttactgacttggagtaccagctcccgtacgtcctcggctcggcgcatcaaggatgcctcccgccgttcccagcagacgtcttcatggtgccacagtatggatacctcaccctgaacaacgggagtcaggcggtaggacgctcttccttttactgcctggagtactttccttctcagatgcttcgcaccggaaacaactttaccttcagctacacttttgaagacgttcctttccacagcagctacgctcacagtcaaagtctggaccgtctcatgaatcctctcatcgaccagtacctgtattacttgagcagaacaaacactccaagcggaaccactacgcagtccaggcttcagttttctcaggccggagcgagtgacattcgggaccagtctaggaactggcttcctggaccctgttaccgccagcagcgagtatcaaagacagctgcggataacaacaacagtgaatactcgtggactggagctaccaagtaccacctcaatggcagagactctctggtgaatccgggcccggccatggccagccacaaggacgatgaagaaaagttttttcctcaaagcggggttctcatctttgggaagcaaggctcagagaaaacaaatgtggacattgaaaaggtcatgattacagacgaagaggaaatcaggaccaccaatcccgtggctacggagcagtatggttctgtatctaccaacctccagagcggcaacacacaagcagctacctcagatgtcaacacacaaggcgttcttccaggcatggtctggcaggacagagacgtgtacctgcaggggcccatctgggcaaaaattccacacacggacggacattttcacccctctcccctcatgggcggatttggacttaaacaccctcctccacagattctcattaagaataccccggtacctgcgaatccttcgaccaccttcagcgcggcaaagtttgcttccttcatcacacagtattccacggggcaggtcagcgtggagatcgagtgggagctgcagaaggagaacagcaaacgctggaatcccgaaattcagtacacttccaactacaacaaatctgttaatgtggactttactgtggacactaatggggtgtattcagagcctcgccctattggcaccagatacctgactcgtaatctgtaa

SEQ ID NO: 302 - DNA, 3159 bp, Artificial Sequence
  Synthetic polynucleotide
gattgatttagcggccgcgaattcgcccttgctgcgtcaactggaccaatgagaactttcccttcaacgattgcgtcgacaagatggtgatctggtgggaggagggaaagatgaccgccaaggtcgtggagtcggccaaagccattctcggaggaagcaaggtgcgtgtggaccaaaagtgcaagtcttcggcccagatcgacccgactcccgtgatcgtcacctccaacaccaacatgtgcgccgtgattgatggaaactcaacgaccttcgagcaccagcagccgttgcaagaccggatgttcaaatttgaacttacccgccgtctggatcatgactttggaaaggtcaccaagcaggaagtgaaagactttttccggtgggcaaaggatcacgtggttgaggtggagcatgagttctacgtcaaaaagggtggagccaaaaaaagacccgcccccagtgacgcagatataagtgagcccaaacgggcgcgcgagtcagttgcgcagccatcgacgtcagacgcggaagcttcgatcaactacgcggacaggtaccaaaacaaatgttctcgtcacgtgggcatgaatctgatgctgtttccctgcagacaatgcgagagaatgaatcagaattcaaatatctgcttcactcacggacagaaagactgtccatagtgctttcccgtgtcagaatctcaacccgtttctgtcgtcaaaaaggcgtatcagaaactgtgctacattcatcacatcatgggaaaggtgccagacgcttgcactgcttgcgacctggtcaatgtggatttggatgactgcatctctgaacaataaatgatttaaatcaggtatggctgccgatggttatcttccagattggctcgaggacactctctctgaaggaataagacagtggtggaagctcaaacctggcccaccaccaccaaagcccgcagagcggcataaggacgacagcaggggtcttgtgcttcctggatacaagtacctcggacccttcaacggactcgacaagggagagccggtcaacgaggcagacgccgcggccctcgagcacgacaaggcctacgaccggcagctcgacagcggagacaacccgtacctcaagtacaaccacgccgacgcggagtttcaggagcgccttaaagaagatacgtcttttgggggcaacctcggacgagcagtcttccaggcgaaaaagagggttcttgaacctctgggcctggttgaggaacctgttaagacggctccgggaaaaaagaggccggtagagcactctcctgtggagccagactcctcctcgggaaccggaaaagcgggcaaccagcctgcaagaaaaagattgaatttcggtcagactggagacgcagactccgtacctgacccccagcctctcggacagccaccagcatccccctctggtctgggaactaatacgatggctacaggcagtggcgcaccaatggcagacaataacgagggcgccgacggagtgggtaattcctcgggaaattggcattgcgattccacatggatgggcgacagagtcgtcaccaccagcacccgcacctgggccctgcccacctacaacaaccacctctacaagcagatttccagccaatcaggagccagcaacgacaaccactactttggctacagcaccccttgggggtattttgacttcaacagattccactgccacttttcgccacgcgactggcagagactcatcaacaacaactggggattccggcccaaaagactcaacttcaagctgtttaacattcaagtcaaggaggtcacgcagaatgacggtacgacgacgattgccaataaccttaccagcacggttcaggtgtttactgacttggagtaccagctcccgtacgtcctcggctcggcgcatcaaggatgcctcccgccgttcccagcagacgtcttcatggtgccacagtatggatacctcaccctgaacaacgggagtcaggcggtaggacgctcttccttttactgcctggagtactttccttctcagatgcttcgcaccggaaacaactttaccttcagctacacttttgaagacgttcctttccacagcagctacgctcacagtcaaagtctggaccgtctcatgaatcctctcatcgaccagtacctgtattacttgagcagaacaaacactccaagcggaaccactacgcagtccaggcttcagttttctcaggccggagcgagtgacattcgggaccagtctaggaactggcttcctggaccctgttaccgccagcagcgagtatcaaagacagctgcggataacaacaacagtgaatactcgtggactggagctaccaagtaccacctcaatggcagagactctctggtgaatccgggcccggccatggccagccacaaggacgatgaagaaaagttttttcctcaaagcggggttctcatctttgggaagcaaggctcagagaaaacaaatgtggacattgaaaaggtcatgattacagacgaagaggaaatcaggaccaccaatcccgtggctacggagcagtatggttctgtatctaccaacctccagagcggcaacacacaagcagctacctcagatgtcaacacacaaggcgttcttccaggcatggtctggcaggacagagacgtgtacctgcaggggcccatctgggcaaaaattccacacacggacggacattttcacccctctcccctcatgggcggatttggacttaaacaccctcctccacagattctcattaagaataccccggtacctgcgaatccttcgaccaccttcagcgcggcaaagtttgcttccttcatcacacagtattccacggggcaggtcagcgtggagatcgagtgggagctgcagaaggagaacagcaaacgctggaatcccgaaattcagtacacttccaactacaacaaatctgttaatgtggactttactgtggacactaatggggtgtattcagagcctcgccctattggcaccagatacctgactcgtaatctgtaattgcttgttaatcaataaaccgtttaattcgtttcagttgaactttggtctctgcgaagggcgaattcgtttaaacctgcaggactagtccctttagtgagg

SEQ ID NO: 303 - protein, 735 aa, Artificial Sequence
  Synthetic polypeptide
MAADGYLPDWLEDTLSEGIRQWWKLKPGPPPPKPAERHKDDSRGLVLPGYKYLGPFNGLDKGEPVNEADAAALEHDKAYDRQLDSGDNPYLKYNHADAEFQERLKEDTSFGGNLGRAVFQAKKRVLEPLGLVEEPVKTAPGKKRPVEHSPVEPDSSSGTGKAGNQPARKRLNFGQTGDADSVPDPQPLGQPPASPSGLGTNTMATGSGAPMADNNEGADGVGNSSGNWHCDSTWMGDRVVTTSTRTWALPTYNNHLYKQISSQSGASNDNHYFGYSTPWGYFDFNRFHCHFSPRDWQRLINNNWGFRPKRLNFKLFNIQVKEVTQNDGTTTIANNLTSTVQVFTDLEYQLPYVLGSAHQGCLPPFPADVFMVPQYGYLTLNNGSQAVGRSSFYCLEYFPSQMLRTGNNFTFSYTFEDVPFHSSYAHSQSLDRLMNPLIDQYLYYLSRTNTPSGTTTQSRLQFSQAGASDIRDQSRNWLPGPCYRQQRVSKTAADNNNSEYSWTGATKYHLNGRDSLVNPGPAMASHKDDEEKFFPQSGVLIFGKQGSEKTNVDIEKVMITDEEEIRTTNPVATEQYGSVSTNLQSGNTQAATSDVNTQGVLPGMVWQDRDVYLQGPIWAKIPHTDGHFHPSPLMGGFGLKHPPPQILIKNTPVPANPSTTFSAAKFASFITQYSTGQVSVEIEWELQKENSKRWNPEIQYTSNYNKSVNVDFTVDTNGVYSEPRPIGTRYLTRNL

SEQ ID NO: 304 - DNA, 2205 bp, Artificial Sequence
  Synthetic polynucleotide
atggctgccgatggttatcttccagattggctcgaggacactctctctgaaggaataagacagtggtggaagctcaaacctggcccaccaccaaagcccgcagagcggcataaggacgacagcaggggtcttgtgcttcctggatacaagtacctcggacccttcaacggactcgacaagggagagccggtcaacgaggcagacgccgcggccctcgagcacgacaaggcctacgaccggcagctcgacagcggagacaacccgtacctcaagtacaaccacgccgacgcggagtttcaggagcgccttaaagaagatacgtcttttgggggcaacctcggacgagcagtcttccaggcgaaaaagagggttcttgaacctctgggcctggttgaggaacctgttaagacggctccgggaaaaaagaggcccgtagagcactctcctgtggagccagactcctcctcgggaaccggaaaagcgggcaaccagcctgcaagaaaaagattgaatttcggtcagactggagacgcagactccgtacctgacccccagcctctcggacagccaccagcagccccctctggtctgggaactaatacgatggctacaggcagtggcgcaccaatggcagacaataacgagggcgccgacggagtgggtaattcctcgggagattggcattgcgattccacatggatgggcgacagagtcatcaccaccagcacccgcacctgggccctgcccacctacaacaaccacctctacaagcagatttccagccaatcaggagccagcaatgacaaccactactttggctacagcaccccttgggggtattttgacttcaacagattccactgccacttttcgccacgcgactggcagagactcatcaacaacaactggggattccggcccaaaagactcaacctcaagctgtttaacattcaagtcaaggaggtcacgcagaatgacggtacgacgacgattgccaataaccttaccagcacggttcaggtgtttactgacttggagtaccagctcccgtacgtcctcggctcggcgcatcaaggatgcctcccgccgttcccagcagacgtcttcatggtgccacagtatggatacctcaccctgaacaacgggagtcaggcggtaggacgctcttccttttactgcctggagtactttccttctcagatgcttcgtaccggaaacaactttaccttcagctacacttttgaagacgttcctttccacagcagctacgctcacagtcaaagtctggaccgtctcatgaatcctctcatcgaccagtacctgtattacttgagcagaacaaacactccaagcggaaccactacgcagtccaggcttcagttttctcaggccggagcgagtgacattcgggaccagtctaggaactggcttcctggaccctgttaccgccagcagcgagtatcaaagacagctgcggataacaacaacggtgaatactcgtggactggagctaccaagtaccacctcaatggcagagactctctggtgaatccgggcccggccatggccagccacaaggacgatgaagaaaagttttttcctcaaagcggggttctcatctttgggaagcaaggctcagagaaaacaaatgtggacattgaaaaggtcatgattacagacgaagaggaaatcaggaccaccaatcccgtggctacggagcagtatggttctgtatctaccaacctccagagcggcaacacacgagcagctacctcagatgtcaacacacaaggcgttcttccaggcatggtctggcaggacagagacgtgtacctgcaggggcccatctgggcaaaaattccacacacggacggacattttcacccctctcccctcatgggcggatttggacttaaacaccctcctccacagattctcattaagaataccccggtacctgcgaatccttcgaccaccttcagcgcggcaaagtttgcttccttcatcacacagtattccacggggcaggtcagcgtggagatcgagtgggagctgcagaaggagaacagcaaacgctggaatcccgaaattcagtacacttccaactacaacaaatctgttaatgtggactttactgtggacactaatggggtgtattcagagcctcgccctattggcaccagatacctgactcgtaatctgtaa

SEQ ID NO: 305 - DNA, 3156 bp, Artificial Sequence
  Synthetic polynucleotide
cgattgaatttagcggccgcgaattcgcccttgctgcgtcaacggaccaatgagaactttcccttcaacgattgcgtcgacaagatggtgatctggtgggaggagggaaagatgaccgccaaggtcgtggagtcggccaaagccattctcggaggaagcaaggtgcgtgtggaccaaaagtgcaagtcttcggcccagatcgacccgactcccgtgatcgtcacctccaacaccaacatgtgcgccgtgattgatggaaactcaacgaccttcgagcaccagcagccgttgcaagaccggatgttcaaatttgaacttacccgccgtctggatcatgactttggaaaggtcaccaagcaggaagtgaaagactttttccggtgggcaaaggatcacgtggttgaggtggagcatgagttctacgtcaaaaagggtggagccaaaaaaagacccgcccccagtgacgcagatataagtgagcccaaacgggcgcgcgagtcagttgcgcagccatcgacgtcagacgcggaagcttcgatcaactacgcggacaggtaccaaaacaaatgttctcgtcacgtgggcatgaatctgatgctgtttccctgcagacaatgcgagcgaatgaatcagaattcaaatatctgcttcactcacggacagaaagactgtttagagtgctttcccgtgtcagaatctcaacccgtttctgtcgtcaaaaaggcgtatcagaaactgtgctacattcatcacatcatgggaaaggtgccagacgcttgcactgcttgcgacctggtcaatgtggatttggatgactgcatctctgaacaataaatgatttaaatcaggtatggctgccgatggttatcttccagattggctcgaggacactctctctgaaggaataagacagtggtggaagctcaaacctggcccaccaccaaagcccgcagagcggcataaggacgacagcaggggtcttgtgcttcctggatacaagtacctcggacccttcaacggactcgacaagggagagccggtcaacgaggcagacgccgcggccctcgagcacgacaaggcctacgaccggcagctcgacagcggagacaacccgtacctcaagtacaaccacgccgacgcggagtttcaggagcgccttaaagaagatacgtcttttgggggcaacctcggacgagcagtcttccaggcgaaaaagagggttcttgaacctctgggcctggttgaggaacctgttaagacggctccgggaaaaaagaggcccgtagagcactctcctgtggagccagactcctcctcgggaaccggaaaagcgggcaaccagcctgcaagaaaaagattgaatttcggtcagactggagacgcagactccgtacctgacccccagcctctcggacagccaccagcagccccctctggtctgggaactaatacgatggctacaggcagtggcgcaccaatggcagacaataacgagggcgccgacggagtgggtaattcctcgggagattggcattgcgattccacatggatgggcgacagagtcatcaccaccagcacccgcacctgggccctgcccacctacaacaaccacctctacaagcagatttccagccaatcaggagccagcaatgacaaccactactttggctacagcaccccttgggggtattttgacttcaacagattccactgccacttttcgccacgcgactggcagagactcatcaacaacaactggggattccggcccaaaagactcaacctcaagctgtttaacattcaagtcaaggaggtcacgcagaatgacggtacgacgacgattgccaataaccttaccagcacggttcaggtgtttactgacttggagtaccagctcccgtacgtcctcggctcggcgcatcaaggatgcctcccgccgttcccagcagacgtcttcatggtgccacagtatggatacctcaccctgaacaacgggagtcaggcggtaggacgctcttccttttactgcctggagtactttccttctcagatgcttcgtaccggaaacaactttaccttcagctacacttttgaagacgttcctttccacagcagctacgctcacagtcaaagtctggaccgtctcatgaatcctctcatcgaccagtacctgtattacttgagcagaacaaacactccaagcggaaccactacgcagtccaggcttcagttttctcaggccggagcgagtgacattcgggaccagtctaggaactggcttcctggaccctgttaccgccagcagcgagtatcaaagacagctgcggataacaacaacggtgaatactcgtggactggagctaccaagtaccacctcaatggcagagactctctggtgaatccgggcccggccatggccagccacaaggacgatgaagaaaagttttttcctcaaagcggggttctcatctttgggaagcaaggctcagagaaaacaaatgtggacattgaaaaggtcatgattacagacgaagaggaaatcaggaccaccaatcccgtggctacggagcagtatggttctgtatctaccaacctccagagcggcaacacacgagcagctacctcagatgtcaacacacaaggcgttcttccaggcatggtctggcaggacagagacgtgtacctgcaggggcccatctgggcaaaaattccacacacggacggacattttcacccctctcccctcatgggcggatttggacttaaacaccctcctccacagattctcattaagaataccccggtacctgcgaatccttcgaccaccttcagcgcggcaaagtttgcttccttcatcacacagtattccacggggcaggtcagcgtggagatcgagtgggagctgcagaaggagaacagcaaacgctggaatcccgaaattcagtacacttccaactacaacaaatctgttaatgtggactttactgtggacactaatggggtgtattcagagcctcgccctattggcaccagatacctgactcgtaatctgtaattgcttgttaatcaataaaccgtttaattcgtttcagttgaactttggtctctgcgaagggcgaattcgtttaaacctgcaggactagtccctttagtgag

SEQ ID NO: 306 - protein, 734 aa, Artificial Sequence
  Synthetic polypeptide
MAADGYLPDWLEDTLSEGIRQWWKLKPGPPPKPAERHKDDSRGLVLPGYKYLGPFNGLDKGEPVNEADAAALEHDKAYDRQLDSGDNPYLKYNHADAEFQERLKEDTSFGGNLGRAVFQAKKRVLEPLGLVEEPVKTAPGKKRPVEHSPVEPDSSSGTGKAGNQPARKRLNFGQTGDADSVPDPQPLGQPPAAPSGLGTNTMATGSGAPMADNNEGADGVGNSSGDWHCDSTWMGDRVITTSTRTWALPTYNNHLYKQISSQSGASNDNHYFGYSTPWGYFDFNRFHCHFSPRDWQRLINNNWGFRPKRLNLKLFNIQVKEVTQNDGTTTIANNLTSTVQVFTDLEYQLPYVLGSAHQGCLPPFPADVFMVPQYGYLTLNNGSQAVGRSSFYCLEYFPSQMLRTGNNFTFSYTFEDVPFHSSYAHSQSLDRLMNPLIDQYLYYLSRTNTPSGTTTQSRLQFSQAGASDIRDQSRNWLPGPCYRQQRVSKTAADNNNGEYSWTGATKYHLNGRDSLVNPGPAMASHKDDEEKFFPQSGVLIFGKQGSEKTNVDIEKVMITDEEEIRTTNPVATEQYGSVSTNLQSGNTRAATSDVNTQGVLPGMVWQDRDVYLQGPIWAKIPHTDGHFHPSPLMGGFGLKHPPPQILIKNTPVPANPSTTFSAAKFASFITQYSTGQVSVEIEWELQKENSKRWNPEIQYTSNYNKSVNVDFTVDTNGVYSEPRPIGTRYLTRNL

SEQ ID NO: 307 - DNA, 2208 bp, Artificial Sequence
  Synthetic polynucleotide
atggctgccgatggttatcttccagattggctcgaggacactctctctgaaggaataagacagtggtggaagctcaaacctggcccaccaccaccaaagcccgcagagcggcataaggacgacagcaggggtcttgtgcttcctgggtacaagtacctcggacccttcaacggactcgacaagggagagccggtcaacgaggcagacgccgcggccctcgagcacgacaaggcctacgaccggcagctcgacagcggagacaacccgtacctcaagtacgaccacgccgacgcggagtttcaggagcgccttaaagaagatacgtcttttgggggcaacctcggacgagcagtcttccaggcaaaaaagagggttcttgaacctctgggcctggttgaggagcctgttaagacggctccgggaaaaaagaggccggtagagcactctcctgtggagccagactcctcctcgggaaccggaaaagcgggcaaccagcctgcaagaaagagattgaatttcggtcagactggagacgcagactccgtacctgacccccagcctctcggacagccaccagcagccccctctggtctgggaactaatacgatggctacaggcagtggcgcaccaatggcagacaataacgatggcgccgacggagtgggtaattcctcgggaaattggcattgcgattccacatggatgggcgacagagtcatcaccaccagcacccgaacctgggctctgcccacctacaacaaccatctgtacaagcagatttccagccaatcaggagccagcaacgacaaccactactttggctacagcaccccttgggggtattttgacttcaacagattccactgccacttttcaccacgtgactggcaaagactcatcaacaacaactggggattccggcccaagagactcaacttcaagctctttaacattcaagtcagagaggtcacgcagaatgatggtacgacgacgattgccaataaccttaccagcacggttcaggtgtttactgactcggagtaccagctcccgtacgtcctcggctcggcgcatcaaggatgcctcccgccgttcccagcagacgtcttcatggtgccacagtatggatacctcaccctgaacaacgggagtcaggcagtaggacgctcttcattttactgcctggagtacttcccttctcagatgctgcgtaccggaaacaactttaccttcagctacacctttgaggatgttcctttccacagcagctacgctcacagccagagtttggaccgtctcatgaatcctctcatcgaccagtacctgtattacttgagcagaacaaacactccaagcggaaccaccacgcagtccaggcttcagttttctcaggccggagcgagtgacattcgggatcagtctaggaactggcttcctggaccctgttaccgccagcagcgagtatcaaagacatctgcggacaacaacaacagtgaatactcgtggattggagctaccaagtaccacctcaatggcagagactctctggtgaatccgggcccggcaatggccagccacaaggacgatgaagaaaagttttttcctcagagcggggttctcatctttggaaaacaaggatcagagaaaacaaatgtggacattgaaaaggtcatgattacagacgaagaggaaatcagaaccaccaatcccgtggccacggagcagtatggttctgtatctaccaacctccagagcggcaacacacaagcatctactgcagatgtcaacacacaaggcgttcttccaggcatggtctggcaggacagagacgtgtacctgcaggggcctatctgggcaaagattccgcacacggacggacattttcacccctctcccctcatgggcggattcggacttaaacaccctcctccacagattctcatcaaaaacaccccggtacctgcgaatccttcgaccaccttcagtgcggcaaagtttgcttccttcatcacacagtattccacggggcgggtcagcgtggagatcgagtgggagctacagaaggagaacagcaaacgctggaatcccgagatccagtacacttccaactacaacaaatctgttaatgtggactttactgtggacactaatggtgtgtattcagagcctcgccccattggcaccagatacctgactcgtaatctgtaa

SEQ ID NO: 308 - protein, 735 aa, Artificial Sequence
  Synthetic polypeptide
MAADGYLPDWLEDTLSEGIRQWWKLKPGPPPPKPAERHKDDSRGLVLPGYKYLGPFNGLDKGEPVNEADAAALEHDKAYDRQLDSGDNPYLKYDHADAEFQERLKEDTSFGGNLGRAVFQAKKRVLEPLGLVEEPVKTAPGKKRPVEHSPVEPDSSSGTGKAGNQPARKRLNFGQTGDADSVPDPQPLGQPPAAPSGLGTNTMATGSGAPMADNNDGADGVGNSSGNWHCDSTWMGDRVITTSTRTWALPTYNNHLYKQISSQSGASNDNHYFGYSTPWGYFDFNRFHCHFSPRDWQRLINNNWGFRPKRLNFKLFNIQVREVTQNDGTTTIANNLTSTVQVFTDSEYQLPYVLGSAHQGCLPPFPADVFMVPQYGYLTLNNGSQAVGRSSFYCLEYFPSQMLRTGNNFTFSYTFEDVPFHSSYAHSQSLDRLMNPLIDQYLYYLSRTNTPSGTTTQSRLQFSQAGASDIRDQSRNWLPGPCYRQQRVSKTSADNNNSEYSWIGATKYHLNGRDSLVNPGPAMASHKDDEEKFFPQSGVLIFGKQGSEKTNVDIEKVMITDEEEIRTTNPVATEQYGSVSTNLQSGNTQASTADVNTQGVLPGMVWQDRDVYLQGPIWAKIPHTDGHFHPSPLMGGFGLKHPPPQILIKNTPVPANPSTTFSAAKFASFITQYSTGRVSVEIEWELQKENSKRWNPEIQYTSNYNKSVNVDFTVDTNGVYSEPRPIGTRYLTRNL

SEQ ID NO: 309 - DNA, 2217 bp, Artificial Sequence
  Synthetic polynucleotide
atggctgccgatggttatcttccagattggctcgaggacaacctctctgagggcattcgcgagtggtgggacttgaaacctggagccccgaaacccaaagccaaccagcaaaagcaggacgacggccggggtctggtgcttcctggctacaagtacctcggacccttcaacggactcgacaagggggagcccgtcaacgcggcggacgcagcggccctcgagcacgacaaggcctacgaccagcagctcaaagcgggtgacaatccgtacctgcggtataaccacgccgacgccgagtttcaggagcgtctgcaagaagatacgtcttttgggggcaacctcgggcgagcagtcttccaggccaagaagcgggttctcgaacctctcggtctggttgaggaaggcgctaagacggctcctggaaagaagagaccggtagagccatcaccccagcgttctccagactcctctacgggcatcggcaagacaggccagcagcccgcgaaaaagagactcaactttgggcagactggcgactcagagtcagtgcccgaccctcaaccaatcggagaaccccccgcaggcccctctggtctgggatctggtacaatggctgcaggcggtggcgctccaatggcagacaataacgaaggcgccgacggagtgggtagttcctcaggaaattggcattgcgattccgcatggctgggcgacagagtcatcaccaccagcacccgaccctgggccctccccacctacaacaaccacctctacaagcaaatctccaacgggacatcgggaggaagcaccaacgacaacacctacttcggctacagcaccccctgggggtattttgactttaacagattccactgccacttctcaccacgtgactggcagcgactcatcaacaacaactggggattccggcccaagagactcaacttcaagctcttcaacatccaggtcaaggaggtcacgcagaatgaaggcaccaagaccatcgccaataaccttaccagcacgattcaggtctttacggactcggaataccagctcccgtacgtcctcggctctgcgcaccagggctgcccgcctccgttcccggcggacgtcttcatgattcctcagtacgggtacctgactctgaacaacggcagtcaggccgtgggccgttcctccttctactgcctggagtactttccttctcaaatgcggagaacgggcaacaactttgagttcagctaccagtttgaggacgtgccttttcacagcagctacgcgcatagccaaagcctggaccggctgatgaaccccctcatcgaccagtacctgtactacctgtctcggactcagtccacgggaggtaccgcaggaactcagcagttgctattttctcaggccgggcctaataacatgtcggctcaggccaaaaactggctacccgggccctgctaccggcagcaacgcgtctccacgacactgtcgcaaaataacaacagcaactttgcttggaccggtgccaccaagtatcatctgaatggcagagactctctggtaaatcccggtgtcgctatggcaacgcacaaggacgacgaagagcgattttttccatccagcggagtcttgatgtttgggaaacagggagctggaaaagacaacgtggactatagcagcgttatgctaaccagtgaggaagaaatcaaaaccaccaacccagtggccacagaacagtacggcgtggtggccgataacctgcaacagcaaaacgccgctcctattgtaggggccgtcaacagtcaaggagccttacctggcatggtctggcagaaccgggacgtgtacctgcagggtcctatctgggccaagattcctcacacggacggcaactttcatccttcgccgctgatgggaggctttggactgaaacacccgcctcctcagatcctgattaagaatacacctgttcccgcggatcctccaactaccttcagtcaagccaagctggcgtcgttcatcacgcagtacagcaccggacaggtcagcgtggaaattgaatgggagctgcagaaagagaacagcaagcgctggaacccagagattcagtatacttccaactactacaaatctacaaatgtggactttgctgtcaatactgagggtacttattcagagcctcgccccattggcacccgttacctcacccgtaacctgtaa

SEQ ID NO: 310 - protein, 738 aa, Artificial Sequence
  Synthetic polypeptide
MAADGYLPDWLEDNLSEGIREWWDLKPGAPKPKANQQKQDDGRGLVLPGYKYLGPFNGLDKGEPVNAADAAALEHDKAYDQQLKAGDNPYLRYNHADAEFQERLQEDTSFGGNLGRAVFQAKKRVLEPLGLVEEGAKTAPGKKRPVEPSPQRSPDSSTGIGKTGQQPAKKRLNFGQTGDSESVPDPQPIGEPPAGPSGLGSGTMAAGGGAPMADNNEGADGVGSSSGNWHCDSAWLGDRVITTSTRPWALPTYNNHLYKQISNGTSGGSTNDNTYFGYSTPWGYFDFNRFHCHFSPRDWQRLINNNWGFRPKRLNFKLFNIQVKEVTQNEGTKTIANNLTSTIQVFTDSEYQLPYVLGSAHQGCPPPFPADVFMIPQYGYLTLNNGSQAVGRSSFYCLEYFPSQMRRTGNNFEFSYQFEDVPFHSSYAHSQSLDRLMNPLIDQYLYYLSRTQSTGGTAGTQQLLFSQAGPNNMSAQAKNWLPGPCYRQQRVSTTLSQNNNSNFAWTGATKYHLNGRDSLVNPGVAMATHKDDEERFFPSSGVLMFGKQGAGKDNVDYSSVMLTSEEEIKTTNPVATEQYGVVADNLQQQNAAPIVGAVNSQGALPGMVWQNRDVYLQGPIWAKIPHTDGNFHPSPLMGGFGLKHPPPQILIKNTPVPADPPTTFSQAKLASFITQYSTGQVSVEIEWELQKENSKRWNPEIQYTSNYYKSTNVDFAVNTEGTYSEPRPIGTRYLTRNL

SEQ ID NO: 311 - protein, 735 aa, Artificial Sequence
  Synthetic polypeptide
MAADGYLPDWLEDTLSEGIRQWWKLKPGPPPPKPAERHKDDSRGLVLPGYKYLGPFNGLDKGEPVNEADAAALEHDKAYDRQLDSGDNPYLKYNHADAEFQERLKEDTSFGGNLGRAVFQAKKRVLEPLGLVEEPVKTAPGKKRPVEHSPVEPDSSSGTGKAGQQPARKRLNFGQTGDADSVPDPQPLGQPPAAPSGLGSTTMATGSGAPMADNNEGADGVGNSSGNWHCDSQWLGDRVITTSTRTWALPTYNNHLYKQISSQSGASNDNHYFGYSTPWGYFDFNRFHCHFSPRDWQRLINNNWGFRPKRLNFKLFNIQVKEVTQNDGTTTIANNLTSTVQVFTDSEYQLPYVLGSAHQGCLPPFPADVFMVPQYGYLTLNNGSQAVGRSSFYCLEYFPSQMLRTGNNFQFSYTFEDVPFHSSYAHSQSLDRLMNPLVDQYLYYLNKTQTNSGTLQQSRLLFSQAGPTNMSLQAKNWLPGPCYRQQRLSKQANDNNNSNFPWTAATKYHLNGRDSLVNPGPAMASHKDDEEKFFPMHGTLIFGKQGTNANDADLENVMITDEEEIRTTNPVATEQYGTVSNNLQNSNTGPTTGTVNHQGALPGMVWQDRDVYLQGPIWAKIPHTDGHFHPSPLMGGFGLKHPPPQIMIKNTPVPANPPTNFSSAKFASFITQYSTGQVSVEIEWELQKENSKRWNPEIQYTSNYNKSVNVDFTVDTNGVYSEPRPIGTRYLTRNL

SEQ ID NO: 312 - DNA, 3158 bp, Artificial Sequence
  Synthetic polynucleotide
gattgaatttagcggccgcgaattcgcccttgctgcgtcaactggaccaatgagaactttcctttcaatgattgcgtcgacaagatggtgatctggtgggaggagggaaagatgaccgccaaggtcgtggagtcggccaaagccattctcggaggaagcaaggtgcgcgcggaccagaaatgcaagtcctcggcccagatagacccgactcccgtgattgtcacctccaacaccaacatgtgcgccgtgattgacgggaactcaacgaccttcgaacaccagcagccgttgcaagaccggatgttcaaatttgaactcacccgccgtctggatcatgactttgggaaggtcaccaagcaggaagtcaaagactttttccggtgggcaaaggatcacgtggttgaggtggagcatgaattctacgtcaaaaagggtggagctaagaaaagacccgcccccagtgacgcagatataagtgagcccaaacgggcgcgcgagtcagttgcgcagccatcgacgtcagacgcggaagcttcgatcaactacgcgggcaggtaccaaaacaaatgttctcgtcacgtgggcatgaatctgatgctgtttccctgcagacaatgcgagagaatgaatcagaattcaaatatctgcttcactcacggacagaaagactgtttagagtgctttcccgtgtcagaatctcaacccgtttctgtcgtcaaaaaggcgtatcagaaactttgctacattcatcatatcatgggaaaggtgccagacgcttgcactgcctgcgatctggtcaatgtggatttggatgactgcatctctgaacaataaatgatttaaatcaggtatggctgccgatggttatcttccagattggctcgaggacactctctctgaaggaataagacagtggtggaagctcaaacctggcccaccaccaccaaagcccgcagagcggcataaggacgacagcaggggtcttgtgcttcctgggtacaagtacctcggacccttcaacggactcgacaagggggagccggtcaacgaggcagacgccgcggccctcgagcacgacaaggcctacgaccggcagctcgacagcggagacaacccgtacctcaagtacaaccacgccgacgcggagtttcaggagcgccttaaagaagatacgtcttttgggggcaacctcggacgagcagtcttccaggcaaaaaagagggttcttgaacctctgggcctggttgaggaacctgttaaaacggctccgggaaaaaagaggccggtagagcactctcctgtggagccagactcctcctcgggaaccggaaaagcgggccagcagcctgcaagaaaaagattgaatttcggtcagactggagacgcagactccgtacctgacccccagcctctcggacagccaccagcagccccctctggtctgggatctactacaatggctacaggcagtggcgcaccaatggcagacaataacgagggtgccgatggagtgggtaattcctcgggaaattggcattgcgattcccaatggctgggcgacagagtcatcaccaccagcacccgcacctgggccctgcccacctacaacaaccacctctacaagcaaatctccagccaatcaggagcctcaaacgacaaccactactttggctacagcaccccctgggggtattttgacttcaacagattccactgccacttttcaccacgtgactggcaaagactcatcaacaacaactggggattccgacccaagagactcaacttcaagctctttaacattcaagtcaaagaggtcacgcagaatgacggtacgacgacgattgccaataaccttaccagcacggttcaggtgtttactgactcggagtaccagctcccgtacgtcctcggctcggcgcatcaaggatgcctcccgccgtttccagcggacgtcttcatggtcccacagtatggatacctcaccctgaacaacgggagtcaggcagtaggacgctcttcattttactgcctggagtactttccttctcagatgctgcgtaccggaaacaactttcaattcagctacacttttgaagacgtgcctttccacagcagctacgctcacagccagagtctggatcggctgatgaatcctctggtcgaccagtacctgtattatctgaacaagacacaaacaaatagtggaactcttcagcagtctcggctactgtttagccaagctggacccaccaacatgtctcttcaagctaaaaactggctgcctggaccttgctacagacagcagcgtctgtcaaagcaggcaaacgacaacaacaacagcaactttccctggactgcagctacaaagtatcatctaaatggccgggactcgttggttaatccaggaccagctatggccagtcacaaggatgacgaagaaaagtttttccccatgcatggaacccttatatttggtaaacaaggaacaaatgccaacgacgcggatttggaaaatgtcatgattacagatgaagaagaaatcaggaccaccaatcccgtggctacggagcagtacggaactgtatcaaataatttgcaaaactcaaacactggtccaactactggaactgtcaatcaccaaggagcgttacctggtatggtgtggcaggatcgagacgtgtacctgcagggacccatttgggccaagattcctcacaccgatggacactttcatccttctccactgatgggaggttttggactcaaacacccacctcctcaaatcatgatcaaaaacactcccgttccagccaatcctcccacaaacttcagttctgccaagtttgcttctttcatcacacagtattccacggggcaggtcagcgtggagatcgagtgggagctgcagaaggagaacagcaaacgctggaatcccgaaattcagtacacttccaactacaacaaatctgttaatgtggactttactgtggacactaatggtgtgtattcagagcctcgccccattggcaccagatacctgactcgtaatctgtaattgcttgttaatcaataaaccgtttaattcgtttcagttgaactttggtctctgcgaagggcgaattcgtttaaacctgcaggactagtccctttagtga

SEQ ID NO: 313 - protein, 735 aa, Artificial Sequence
  Synthetic polypeptide
MAADGYLPDWLEDTLSEGIRQWWKLKPGPPPPKPAERHKDDSRGLVLPGYKYLGPFNGLDKGEPVNEADAAALEHDKAYDRQLDSGDNPYLKYNHADAEFQERLKEDTSFGGNLGRAVFQAKKRVLEPLGLVEEPVKTAPGKKRPVEHPPVEPDSSSGTGKAGQQPARKRLNFGQTGDADSVPDPQPLGQPPAAPSGLGSTTMATGSGAPMADNNEGADGVGNSSGNWHCDSQWLGDRVITTSTRTWALPTYNNHLYKQISSQSGASNDNHYFGYSTPWGYFDFNRFHCHFSPRDWQRLINNNWGFRPKRLNFKLFNIQVKEVTQNDGTTTIANNLTSTVQVFTDSEYQLPYVLGSAHQGCLPPFPADVFMVPQYGYLTLNNGSQAVGRSSFYCLEYFPSQMLRTGNNFQFSYTFEDVPFHSSYAHSQSLDRLMNPLIDQYLYYLNKTQTNSGTLQQSRLLFSQAGPTNMSLQAKNRLPGPCYRQQRLSKQANDNNNSNFPWTAATKYHLNGRDSLVNPGPAMASHKDDEEKFFPMHGTLIFGKQGTNANDADLENVMITDEEEIRTTNPVATEQYGTVSNNLQNSNTGPTTGTVNHQGALPGMVWQDRDVYLQGPIWAKIPHTDGHFHPSPLVGGFGLKHPPPQIMIKNTPVPANPPTNFSSAKFASFITQYSTGQVSVEIEWELQKENSKRWNPEIQYTSNYNKSVNVDFTVDTNGVYSEPRPIGTRYLTRNL

SEQ ID NO: 314 - DNA, 3159 bp, Artificial Sequence
  Synthetic polynucleotide
gattgaatttagcggccgcgaattcgcccttgctgcgtcaactggaccaatgagaactttcctttcaatgattgcgtcgacaagatggtgatctggtgggaggagggaaagatgaccgccaaggtcgtggagtcggccaaagccattctcggaggaagcaaggtgcgcgtggaccagaaatgcaagtcctcggcccagatagacccgactcccgtgattgtcacctccaacaccgacatgtgcgccgtgattgacgggaactcaacgaccttcgaacaccagcagccgttgcaagaccggatgttcaaatttgaactcacccgccgtctggatcatgactttgggaaggtcaccaagcaggaagtcaaagactttttccggtgggcaaaggatcacgtggttgaggtggagcatgaattctacgtcaaaaagggtggagctaagaaaagacccgcccccagtgacgcagatataagtgagcccaaacgggcgcgcgagtcagttgcgcagccatcgacgtcagacgcggaagcttcgatcaactacgcggacaggtaccaaaacaaatgttctcgtcacgtgggcatgaatctgatgctgtttccctgcagacaatgcgagagaatgaatcagaattcaaatatctgcttcactcacggacagaaagactgtttagagtgctttcccgtgtcagaatctcaacccgtttctgtcgtcaaaaaggcgtatcagaaactttgctacattcatcatatcatgggaaaggtgccagacgcttgcactgcctgcgatctggtcaatgtggatttggatgactgcatctctgaacaataaatgatttaaatcaggtatggctgccgatggttatcttccagattggctcgaggacactctctctgaaggaataagacagtggtggaagctcaaacctggcccaccaccaccaaagcccgcagagcggcataaggacgacagcaggggtcttgtgcttcctgggtacaagtacctcggacccttcaacggactcgacaagggggagccggtcaacgaggcagacgccgcggccctcgagcacgacaaggcctacgaccggcagctcgacagcggagacaacccgtacctcaagtacaaccacgccgacgcggagtttcaggagcgccttaaagaagatacgtcttttgggggcaacctcggacgagcagtcttccaggcaaaaaagagggttcttgaacctctgggcctggttgaggaacctgttaaaacggctccgggaaaaaagaggccggtagagcaccctcctgtggagccagactcctcctcgggaaccggaaaagcgggccagcagcctgcaagaaaaagattgaatttcggtcagactggagacgcagactccgtacctgacccccagcctctcggacagccaccagcagccccctctggtctgggatctactacaatggctacaggcagtggcgcaccaatggcagacaataacgagggtgccgatggagtgggtaattcctcgggaaattggcattgcgattcccaatggctgggcgacagagtcatcaccaccagcacccgcacctgggccctgcccacctacaacaaccacctctacaagcaaatctccagccaatcaggagcctcaaacgacaaccactactttggctacagcaccccctgggggtattttgacttcaacagattccactgccacttttcaccacgtgactggcaaagactcatcaacaacaactggggattccgacccaagagactcaacttcaagctctttaacattcaagtcaaagaggtcacgcagaatgacggtacgacgacgattgccaataaccttaccagcacggttcaggtgtttactgactcggagtaccagctcccgtacgtcctcggctcggcgcatcaaggatgcctcccgccgtttccagcggacgtcttcatggtcccacagtatggatacctcaccctgaacaacgggagtcaggcagtaggacgctcttcattttactgcctggagtactttccttctcagatgctgcgtaccggaaacaactttcagttcagctacacttttgaagacgtgcctttccacagcagctacgctcacagccagagtctggatcggctgatgaatcctctgatcgaccagtacctgtattatctgaacaagacacaaacaaatagtggaactcttcagcagtctcggctactgtttagccaagctggacccaccaacatgtctcttcaagctaaaaaccggctgcctggaccttgctacagacagcagcgtctgtcaaagcaggcaaacgacaacaacaacagcaactttccctggaccgcagctacaaagtatcatctaaatggccgggactcgttggttaatccaggaccagctatggccagtcacaaggatgacgaagaaaagtttttccccatgcatggaacccttatatttggtaaacaaggaacaaatgccaacgacgcggatttggaaaatgtcatgattacagatgaagaagaaatcaggaccaccaatcccgtggctacggagcagtacggaactgtatcaaataatttgcaaaactcaaacactggtccaactactggaactgtcaatcaccaaggagcgttacctggtatggtgtggcaggatcgagacgtgtacctgcagggacccatttgggccaagattcctcacaccgatggacactttcatccttctccactggtgggaggttttggactcaaacacccacctcctcaaatcatgatcaaaaacactcccgttccagccaatcctcccacaaacttcagttctgccaagtttgcttctttcatcacacagtattccacggggcaggtcagcgtggagatcgagtgggagctgcagaaggagaacagcaaacgctggaatcccgaaattcagtacacttccaactacaacaaatctgttaatgtggactttactgtggacactaatggtgtgtattcagagcctcgccccattggcaccagatacctgactcgtaatctgtaattgcttgttaatcaataaaccgtttaattcgtttcagttgaactttggtctctgcgaagggcgaattcgtttaaacctgcaggactagtccctttagtgag

SEQ ID NO: 315 - DNA, 2208 bp, Artificial Sequence
  Synthetic polynucleotide
atggctgccgatggttatcttccagattggctcgaggacactctctctgaaggaataagacagtggtggaagctcaaacctggcccaccaccaccaaagcccgcagagcggcataaggacgacagcaggggtcttgtgcttcctgggtacaagtaccttggacccttcaacggactcgacaagggagagccggtcaacgaggcagacgccgcggccctcgagcacgacaaggcctacgaccggcagctcgacagcggagacaacccgtaccccaagtacaaccacgccgacgcggagttccaggagcgtcttaaagaagatacgtcttttgggggcaacctcggacgagcagtcttccaggcgaaaaagagggttcttgaacctctgggcctggttgaggaacctgttaagacggctccgggaaaaaagaggccggtagagcactctcctgcggagccagactcctcctcgggaaccggaaaagcgggccagcagcctgcaagaaagagattgaatttcggtcagactggagacgcagactccgtacctgacccccagcctctcggacagccaccagcagccccctctggtctgggaactaatacgatggctacaggcagtggcgcaccaatggcagacaataacgagggcgccgacggagtgggtaattcctcgggaaattggcattgcgattccacatggatgggcgacagagtcatcaccaccagcacccgcacctgggctctgcccacctacaacaaccacctctacaagcagatttccagccaatcaggagcctcaaacgacaaccactactttggctacagcaccccttgggggtattttgacttcaacagattccactgccacttttcgccacgtgactggcaaagactcatcaacaacaattggggattccggcccaaaagactcaacttcaagctctttaacattcaagtcaaggaggtcacgcagaatgacggtacgacgacgattgccaataaccttaccagcacggttcaggtgtttactgactcggagtaccagctcccgtacgtcctcggctcggcgcatcaaggatgcctcccgccgttcccagcagacgtcttcatggtgccacagtatggatacctcaccctgaacaacgggagtcaggcagtaggacgctcttcattttactgcctggagtactttccttctcagatgctgcgtaccggaaacaactttaccttcagctacacctttgaggacgttcctttccacagcagctacgcccacagccagagtttggaccgtctcatgaatcctctcatcgaccagtacctgtattacttgagcagaacaaacactccaagcggaaccaccacgcagtcaaggcttcagttttctcaggccggagcaagtgacattcgggaccagtctaggaactggcttcctggaccctgttaccgccagcagcgagtatcaaagacatctgcggataacaacaacagtgaatactcgtggactggagctaccaagtaccaccttaatggaagagactctctggtgaatccgggcccggccatggccagccacaaggacgatgaagaaaagttttttcctcagagcggggttctcatctttggaaaacaagactcgggaaaaactaatgtggacattgaaaaggtcatgattacagacgaagaggaaatcaggaccaccaatcccgtggctacggagcagtatggttctgtatctaccaacctccagagcggcaacacacaagcagctacctcagatgtcaacacacaaggcgttcttccaggcatggtgtggcaggacagagacgtgtacctgcaggggcccatctgggcaaagattccacacacggacggacattttcacccctctcccctcatgggcggattcggacttaaacaccctcccccgcagattctcatcaagaacaccccggtacctgcgaatccttcgactaccttcagtgcggcaaagtttgcttccttcattacacagtactccacggggcaggtcagcgtggagatcgagtgggagctgcagaaggagaacagcaaacgctggaatcccgagattcagtacacttccaactacaacaaatctgttaatgtggactttactgtggacactaatggtgtgtattcagagcctcgccccattggcaccaggtacctgactcgtaatctgtaa

SEQ ID NO: 316 - protein, 735 aa, Artificial Sequence
  Synthetic polypeptide
MAADGYLPDWLEDTLSEGIRQWWKLKPGPPPPKPAERHKDDSRGLVLPGYKYLGPFNGLDKGEPVNEADAAALEHDKAYDRQLDSGDNPYPKYNHADAEFQERLKEDTSFGGNLGRAVFQAKKRVLEPLGLVEEPVKTAPGKKRPVEHSPAEPDSSSGTGKAGQQPARKRLNFGQTGDADSVPDPQPLGQPPAAPSGLGTNTMATGSGAPMADNNEGADGVGNSSGNWHCDSTWMGDRVITTSTRTWALPTYNNHLYKQISSQSGASNDNHYFGYSTPWGYFDFNRFHCHFSPRDWQRLINNNWGFRPKRLNFKLFNIQVKEVTQNDGTTTIANNLTSTVQVFTDSEYQLPYVLGSAHQGCLPPFPADVFMVPQYGYLTLNNGSQAVGRSSFYCLEYFPSQMLRTGNNFTFSYTFEDVPFHSSYAHSQSLDRLMNPLIDQYLYYLSRTNTPSGTTTQSRLQFSQAGASDIRDQSRNWLPGPCYRQQRVSKTSADNNNSEYSWTGATKYHLNGRDSLVNPGPAMASHKDDEEKFFPQSGVLIFGKQDSGKTNVDIEKVMITDEEEIRTTNPVATEQYGSVSTNLQSGNTQAATSDVNTQGVLPGMVWQDRDVYLQGPIWAKIPHTDGHFHPSPLMGGFGLKHPPPQILIKNTPVPANPSTTFSAAKFASFITQYSTGQVSVEIEWELQKENSKRWNPEIQYTSNYNKSVNVDFTVDTNGVYSEPRPIGTRYLTRNL

SEQ ID NO: 317 - DNA, 2208 bp, Artificial Sequence
  Synthetic polynucleotide
atggctgccgatggttatcttccagattggctcgaggacactctctctgaaggaataagacagtggtggaagctcaaacctggcccaccaccaccaaagcccgcagagcggcataaggacgacagcaggggtcttgtgcttcctgggtacaagtaccttggacccttcaacggactcgacaagggagagccggtcaacgaggcagacgccgcggccctcgagcacgacaaggcctacgaccggcagctcgacggcggagacaacccgtacctcaagtacaaccacgccgacgcggagttccaggagcgtcttaaagaagatacgtcttttgggggcaacctcggacgagcagtcttccaggcgaaaaagagggttcttgaacctctgggcctggttgaggaacctgttaagacggctccgggaaaaaagaggccggtagagcactctcttgcggagccagactcctcctcgggaaccggaaaagcgggccagcagcctgcaagaaggagattgaatttcggtcagactggagacgcagactccgtacctgacccccagcctctcggacagccaccagcagccccctctggtctgggaactaatacgatggctacaggcagtggcgcaccaatggcagacaataacgagggcgccgacggagtgggtaattcctcgggaaattggcattgcgattccacatggatgggcgacagagtcatcaccaccagcacccgcacctgggctctgcccacctacaacaaccacctctacaggcagatttccagccaatcaggagcctcaaacgacaaccactactttggctacagcaccccttgggggtattttgacttcaacagattccactgccacttttcgccacgtgactggcaaagactcatcaacaacaattggggatcccggcccaaaagactcaacttcaagctctttaacattcaagtcaaggaggtcacgcagaatgacggtacgacgacgattgccaataaccttaccagcacggttcaggtgtttactgactcggagtaccagctcccgtacgtcctcggctcggcgcatcaaggatgcctcccgccgttcccagcagacgtcttcatggtgccacagtatggatacctcaccctgaacaacgggagtcaggcagtaggacgctcttcattttactgcctggagtactttccttctcagatgctgcgtaccggaaacaactttaccttcagctacacctttgaggacgttcctttccacagcagctacgcccacagccagagtttggaccgtctcatgaatcctctcgtcgaccagtacctgtattacttgagcagaacaaacactccaagcggaaccaccacgcagtcaaggcttcagttttctcaggccggagcaagtgacattcgggaccagtctaggaactggcttcctggaccctgttaccgccagcagcgagtatcaaagacatctgcggataacaacaacagtgaatactcgtggactggagctaccaagtaccaccttaatggaagagactctctggtgaatccgggcccggccatggccagccacaaggacgatgaagaaaagttttttcctcagagcggggttctcatctttggaaaacaagactcgggaaaaactaatgtggacattgaaaaggtcatgattacagacgaagaggaaatcaggaccaccaatcccgtggctacggagcagtatggttctgtatctaccaacctccagagcggcaacacacaagcagctacctcagatgtcaacacacaaggcgttcttccaggcatggtgtggcaggacagagacgtgtacctgcaggggcccatctgggcaaagattccacacacggacggacattttcacccctctcccctcatgggcggattcggacttaaacaccctcccccgcagattctcatcaagaacaccccggtacctgcgaatccttcgactaccttcagtgcggcaaagtttgcttccttcattacacagtactccacggggcaggtcagcgtggagatcgagtgggagctgcagaaggagaacagcaaacgctggaatcccgagattcagtacacttccaactacaacaaatctgttaatgtggactttactgtggacactaatggtgtgtattcagagcctcgccccattggcaccagatacctgactcgtaatctgtaa

SEQ ID NO: 318 - protein, 735 aa, Artificial Sequence
  Synthetic polypeptide
MAADGYLPDWLEDTLSEGIRQWWKLKPGPPPPKPAERHKDDSRGLVLPGYKYLGPFNGLDKGEPVNEADAAALEHDKAYDRQLDGGDNPYLKYNHADAEFQERLKEDTSFGGNLGRAVFQAKKRVLEPLGLVEEPVKTAPGKKRPVEHSLAEPDSSSGTGKAGQQPARRRLNFGQTGDADSVPDPQPLGQPPAAPSGLGTNTMATGSGAPMADNNEGADGVGNSSGNWHCDSTWMGDRVITTSTRTWALPTYNNHLYRQISSQSGASNDNHYFGYSTPWGYFDFNRFHCHFSPRDWQRLINNNWGSRPKRLNFKLFNIQVKEVTQNDGTTTIANNLTSTVQVFTDSEYQLPYVLGSAHQGCLPPFPADVFMVPQYGYLTLNNGSQAVGRSSFYCLEYFPSQMLRTGNNFTFSYTFEDVPFHSSYAHSQSLDRLMNPLVDQYLYYLSRTNTPSGTTTQSRLQFSQAGASDIRDQSRNWLPGPCYRQQRVSKTSADNNNSEYSWTGATKYHLNGRDSLVNPGPAMASHKDDEEKFFPQSGVLIFGKQDSGKTNVDIEKVMITDEEEIRTTNPVATEQYGSVSTNLQSGNTQAATSDVNTQGVLPGMVWQDRDVYLQGPIWAKIPHTDGHFHPSPLMGGFGLKHPPPQILIKNTPVPANPSTTFSAAKFASFITQYSTGQVSVEIEWELQKENSKRWNPEIQYTSNYNKSVNVDFTVDTNGVYSEPRPIGTRYLTRNL

SEQ ID NO: 319 - protein, 738 aa, Artificial Sequence
  Synthetic polypeptide
MAADGYLPDWLEDNLSEGIREWWDLKPGAPKPKANQQKQDDGRGLVLPGYKYLGPFNGLDKGEPVNAADAAALEHDKAYDQQLKAGDNPYLRYNHADAEFQERLQEDTSFGGNLGRAVFQAKKRVLEPLGLVEEAAKTAPGKKRPVEPSPQRSPDSSAGIGKKGQQPAKKRLNFGQTGDSESVPDPQPIGEPPAGPSGLGSGTMAAGGGAPMADNNEGADGVGSSSGNWHCDSTWLGDRVITTSTRTWALPTYNNHLYKQISNGTSGGSTNDNTYFGYSTPWGYFDFNRFHCHFSPRDWQRLINNNWGFRPKRLSFKLFNIQVKEVTQNEGTETIANNLTSTIQVFTDSEYQLPYVLGSAHQGCLPPFPADVFMIPQYGYLTLNNGSQAVGRSSFYCLEYFPSQMLRTGNNFEFSYTFEDVPFHSSCAHSQSSDRLMNPLIDQYLYYLSRTRSTGGTQGTQQLLFSQAGPANMSAQAKNWLPGPCYRQQRVSTTLSQNNNSNFAWTGATKYHLNGRDSLVNPGVAMATHKDDEERFFPSSGVLMFGKQGAGRDNVDYSSVMLTSEEEIKTTNPVATEQYGVVADNLQQTNTGPIVGNVNSQGALPGMVWQNRDVYLQGPIWAKIPHTDGNFHPSPLMGGFGLKHPPPQILIKNTPVPADPPTTFSQAKLASFITQYSTGQVSVEIEWELQKENSKRWNPEIQYTSNYYKSTNVDFAVNTEGTYSEPRPIGTRYLTRNL

SEQ ID NO: 320 - DNA, 2217 bp, Artificial Sequence
  Synthetic polynucleotide
atggctgctgacggttatcttccagattggctcgaggacaacctctctgagggcattcgcgagtggtgggacctgaaacctggagcccccaagcccaaggccaaccagcagaagcaggacgacggccggggtctggtgcttcttggctacaagtacctcggacccttcaacggactcgacaagggggagcccgtcaatgcggcggacgcagcggccctcgagcacgacaaggcctacgaccagcagctcaaagcgggtgacaatccgtacctgcggtataaccacgccgacgccgagtttcaggagcgtctgcaagaagatacgtcttttgggggcaacctcgggcgagcagtcttccaggccaagaagcgggttctcgaacctctcggtctggttgaggaagctgctaagacggctcctggaaagaagagaccggtagaaccgtcacctcagcgttcccccgactcctccacgggcatcggcaagaaaggccagcagcccgctaaaaagagactgaactttggtcagactggcgactcagagtcagtccccgaccctcaaccaatcggagaaccaccagcaggcccctctggtctgggatctggtacaatggctgcaggcggtggcgctccaatggcagacaataacgaaggcgccgacggagtgggtagttcctcaggaaattggcattgcgattccacatggctgggcgacagagtcatcaccaccagcacccgaacctgggccctgcccacctacaacaaccacctctacaagcaaatatccaatgggacatcgggaggaagcaccaacgacaacacctacttcggctacagcaccccctgggggtattttgacttcaacagattccactgccacttctcaccacgtgactggcagcgactcatcaacaacaactggggattccggccaaaaagactcagcttcaagctcttcaacatccaggtcaaggaggtcacgcagaatgaaggcaccaagaccatcgccaataaccttaccagcacgattcaggtatttacggactcggaataccagctgccgtacgtcctcggctccgcgcaccagggctgcctgcctccgttcccggcggacgtcttcatgattccccagtacggctaccttacactgaacaatggaagtcaagccgtaggccgttcctccttctactgcctggaatattttccatctcaaatgctgcgaactggaaacaattttgaattcagctacaccttcgaggacgtgcctttccacagcggctacgcacacagccagagcttggaccgactgatgaatcctctcatcgaccagtacctgtactacttatccagaactcagtccacaggaggaactcaaggtacccagcaattgttattttctcaagctgggcctgcaaacatgtcggctcaggctaagaactggctacctggaccttgctaccggcagcagcgagtctctacgacactgtcgcaaaacaacaacagcaactttgcttggactggtgccaccaaatatcacctgaacggaagagactctttggtaaatcccggtgtcgccatggcaacccacaaggacgacgaggaacgcttcttcccgtcgagtggagtcctgatgtttggaaaacagggtgctggaagagacaatgtggactacagcagcgttatgctaaccagcgaagaagaaattaaaaccactaaccctgtagccacagaacaatacggtgtggtggctgacaacttgcagcaaaccaatacagggcctattgtgggaaatgtcaacagccaaggagccttacctggcatggtctggcagaaccgagacgtgtacctgcagggtcccatctgggccaagattcctcacacggacggcaacttccacccttcaccgctaatgggaggatttggactgaagcacccacctcctcagatcctgatcaagaacacgccggtacctgcggatcctccaacgacgttcagccaggcgaaattggcttccttcattacgcagtacagcaccggacaggtcagcgtggaaatcgagtgggagctgcagaaggagaacagcaaacgctggaacccagagattcagtacacttcaaactactacaaatctacaaatgtggactttgctgtcaatacagagggaacttattctgagcctcgccccattggtactcgttacctcacccgtaatctgtaa

SEQ ID NO: 321 - protein, 738 aa, Artificial Sequence
  Synthetic polypeptide
MAADGYLPDWLEDNLSEGIREWWDLKPGAPKPKANQQKQDDGRGLVLLGYKYLGPFNGLDKGEPVNAADAAALEHDKAYDQQLKAGDNPYLRYNHADAEFQERLQEDTSFGGNLGRAVFQAKKRVLEPLGLVEEAAKTAPGKKRPVEPSPQRSPDSSTGIGKKGQQPAKKRLNFGQTGDSESVPDPQPIGEPPAGPSGLGSGTMAAGGGAPMADNNEGADGVGSSSGNWHCDSTWLGDRVITTSTRTWALPTYNNHLYKQISNGTSGGSTNDNTYFGYSTPWGYFDFNRFHCHFSPRDWQRLINNNWGFRPKRLSFKLFNIQVKEVTQNEGTKTIANNLTSTIQVFTDSEYQLPYVLGSAHQGCLPPFPADVFMIPQYGYLTLNNGSQAVGRSSFYCLEYFPSQMLRTGNNFEFSYTFEDVPFHSGYAHSQSLDRLMNPLIDQYLYYLSRTQSTGGTQGTQQLLFSQAGPANMSAQAKNWLPGPCYRQQRVSTTLSQNNNSNFAWTGATKYHLNGRDSLVNPGVAMATHKDDEERFFPSSGVLMFGKQGAGRDNVDYSSVMLTSEEEIKTTNPVATEQYGVVADNLQQTNTGPIVGNVNSQGALPGMVWQNRDVYLQGPIWAKIPHTDGNFHPSPLMGGFGLKHPPPQILIKNTPVPADPPTTFSQAKLASFITQYSTGQVSVEIEWELQKENSKRWNPEIQYTSNYYKSTNVDFAVNTEGTYSEPRPIGTRYLTRNL

SEQ ID NO: 322 - protein, 735 aa, Artificial Sequence
  Synthetic polypeptide
MAADGYLPDWLEDTLSEGIRQWWKLKPGPPPPKPAERHKDDSRGLVLPGYKYLGPFNGLDKGEPVNEADAAALEHDKAYDRQLDSGDNPYLKYNHADAEFQERLKEDTSFGGNLGRAVFQAKKRVLEPLGLVEPPVKTAPGKKRPVEHSPAEPDSSSGTGKAGQQPARKRLNFGQTGDADSVPDPQPLGQPPAAPSGLGSTTMATGSGAPMADNNEGADGVGNSSGNWHCDSQWLGDRVITTSTRTWALPTYNNHLYKQISSQSGASNDNHYFGYSTPWGYFDFNRFHCHFSPRDWQRLINNNWGFRPKRLNFKLFNIQVKEVTQNDGTTTIANNLTSTVQVFTDSEYQLPYVLGSAHQGCLPPFPADVFMVPQYGYLTLNNGSQAVGRSSFYCLEYFPSQMLRTGNNFQFSYTFEDVPFHSSYAHSQSLDRLMNPLIDQYLYYLNKTQSNSGTLQQSRLLFSQAGPTSMSLQAKNWLPGPCYRQQRLSKQANDNNNSNFPWTAATKYHLNGRDSLVNPGPAMASHKDDEEKFFPMHGTLIFGKQGTNANDADLDNVMITDEEEIRTTNPVATEQYGYVSNNLQNSNTGPTTGTVNHQGALPGMVWQDRDVYLQGPIWAKIPHTDGHFHPSPLMGGFGLKHPPPQIMIKNTPVPANPPTNFSSAKFASFITQYSTGQVSVEIEWELQKENSKRWNPEIQYTSNYNKSVNVDFTVDTNGVYSEPRPIGTRYLTRNL

SEQ ID NO: 323 - protein, 735 aa, Artificial Sequence
  Synthetic polypeptide
MAADGYLPDWLEDTLSEGIRQWWKLKPGPPPPKPAERHKDDSRGLVLPGYKYLGPFNGLDKGEPVNEADAAALEHDKAYDRQLDSGDNPYLKYNHADAEFQERLKEDTSFGGNLGRAVFQAKKRVLEPLGLVEGPVKTAPGKKRPVEHSPAEPDSSSGTGKAGQQPARKRLNFGQTGDADSVPDPQPLGQPPAAPSGLGSTTMATGSGAPMADNNEGADGVGNSSGNWHCDSQWLGDRVITTSTRTWALPTYNNHLYKQISSQSGASNDNHYFGYSTPWGYFDFNRFHCHFSPRDWQRLINNNWGFRPKRLNFKLFNIQVKEVTQNDGTTTIANNLTSTVQVFTDSEYQLPYVLGSAHQGCLPPFPADVFMVPQYGYLTLNNGSQAVGRSSFYCLEYFPSQMLRTGNNFQFSYTFEDVPFHSSYAHSQSLDRLMNPLIDQYLYYLNKTQSNSGTLQQSRLLFSQAGPTSMSLQAKNWLPGPCYRQQRLSKQANDNNNSNFPWTAATKYHLNGRDSLVNPGPAMASHKDDEEKFFPMHGTLIFGKQGTNANDADLDNVMITDEEEIRTTNPVATEQYGYVSNNLQNSNTGPTTGTVNHQGALPGMVWQDRDVYLQGPIWAKIPHTDGHFHPSPLMGGFGLKHPPPQIMIKNTPVPANPPTNFSSAKFASFITQYSTGQVSVEIEWELQKENSKRWNPEIQYTSNYNKSVNVDFTVDTNGVYSEPRPIGTRYLTRNL

SEQ ID NO: 324 - DNA, 2208 bp, Artificial Sequence
  Synthetic polynucleotide
atggctgccgatggttatcttccagattggctcgaggacactctctctgaaggaataagacagtggtggaagctcaaacctggcccaccaccaccaaagcccgcagagcggcataaggacgacagcaggggtcttgtgcttcctgggtacaagtacctcggacccttcaacggactcgacaagggggagccggtcaacgaggcagacgccgcggccctcgagcacgacaaggcctacgaccggcagctcgacagcggagacaacccgtacctcaagtacaaccacgccgacgcggagtttcaggagcgtcttaaagaagatacgtcttttgggggcaacctcggacgagcagtcttccaggcgaaaaagagggttcttgaacctctgggcctggttgagggacctgttaagacggctccgggaaaaaagaggccggtagagcactctcctgcggagccagactcctcctcgggaaccggaaaagcgggccagcagcctgcaagaaaaagattgaattttggtcagactggagacgcagactccgtacctgacccccagcctctcggacagccaccagcagccccctctggtttgggatctactacaatggctacaggcagtggcgcaccaatggcagacaataacgagggtgccgatggagtgggtaattcctcaggaaattggcattgcgattcccaatggctgggcgacagagtcatcaccaccagcacccgaacctgggccctgcccacctacaacaaccacctctacaagcaaatctcaagccaatcaggagcctcaaacgacaaccactactttggctacagcaccccttgggggtattttgacttcaacagattccactgccacttttcaccacgtgactggcaaagactcatcaacaacaactggggattccgacccaagagactcaacttcaagctctttaacattcaagtcaaagaggtcacgcagaatgacggtacgacgacgattgccaataaccttaccagcacggttcaggtgtttactgactcggagtaccagctcccgtacgtcctcgggtcggcgcatcaaggatgcctcccgccgtttccagcggacgtcttcatggtcccacagtatggatacctcaccctgaacaacgggagtcaggcggtaggacgctcttccttttactgcctggagtactttccttctcagatgcttcgtactggaaacaactttcagttcagctacacctttgaagacgttcctttccacagcagctacgctcacagccagagtctggatcggctgatgaatcctctgatcgaccagtacctgtattatctgaacaaaacacaatcaaatagtggaactcttcagcagtctcggctactgtttagtcaagctggacccaccagcatgtctcttcaagctaaaaactggctacctggaccttgctacagacagcagcgtctgtcaaagcaggcaaacgacaacaacaacagcaactttccctggactgcggctacaaagtatcacctaaatggccgggactcgttggttaatccaggaccagctatggccagtcacaaagacgatgaagaaaagtttttccccatgcatggaaccctgatatttggtaaacaaggaacaaatgctaacgacgcggatttggacaatgtcatgattacagatgaagaagaaatccgcaccaccaatcccgtggctacggagcagtacggatatgtgtcaaataatttgcaaaactcaaatactggtccaactactggaactgtcaatcaccaaggagcgttacctggcatggtgtggcaggatcgagacgtgtacctgcagggacccatttgggccaagattcctcacaccgatggacactttcatccttctccactgatgggaggttttgggctcaaacacccgcctcctcagatcatgatcaaaaacactcccgttccagccaatcctcccacaaacttcagttctgccaagtttgcttctttcatcacacagtattccacggggcaggtcagcgtggagatcgagtgggagctgcagaaagagaacagcaaacgctggaatcccgaaattcagtacacttccaactacaacaaatctgttaatgtggactttactgtggacactaatggcgtgtattcagagcctcgccccattggcaccagatacctgactcgtaatctgtaa

SEQ ID NO: 325 - DNA, 2211 bp, Artificial Sequence; identical to SEQ ID NO: 6
  Synthetic polynucleotide

SEQ ID NO: 326 - DNA, 2208 bp, Artificial Sequence
  Synthetic polynucleotide
atggctgccgatggttatcttccagattggctcgaggacactctctctgaaggaacaagacagtggtggaagctcaaacctggcccaccaccaccaaagcccgcagagcggcataaggacgacagcaggggtcttgtgcttcctgggtacaagtacctcggacccttcaacggactcgacaagggggagccggtcaacgaggcagacgccgcggccctcgagcacgacaaggcctacgaccggcagctcgacagcggagacaacccgtacctcaagtacaaccacgccgacgcggagtttcaggagcgtcttaaagaagatacgtcttttgggggcaacctcggacgagcagtcttccaggcgaaaaagagggttcttgaacctctgggcctggttgaggaacctgttaagacggctccgggaaaaaagaggccggtagagcactctcctgcggagccagactcctcctcgggaaccggaaaagcgggccagcagcctgcaagaaaaagattgaattttggtcagactggagacgcagactccgtacctgacccccagcctctcggacagccaccagcagccccctctggtttgggatctactacaatggctacaggcagtggcgcaccaatggcagacaataacgagggtgccgatggagtgggtaattcctcaggaaattggcattgcgattcccaatggctgggcgacagagtcatcaccaccagcacccgaacctgggccctgcccacctacaacaaccacctctacaagcaaatctcaagccaatcaggagcctcaaacgacaaccactactttggctacagcaccccttgggggtattttgacttcaacagattccactgccacttttcaccacgtgactggcaaagactcatcaacaacaactggggattccgacccaagagactcaacttcaagctctttaacattcaagtcaaagaggtcacgcagaatgacggtacgacgacgattgccaataaccttaccagcacggttcaggtgtttactgactcggagtaccagctcccgtacgtcctcgggtcggcgcatcaaggatgcctcccgccgtttccagcggacgtcttcatggtcccacagtatggatacctcaccctgaacaacgggagtcaggcggtaggacgctcttccttttactgcctggagtactttccttctcagatgcttcgtactggaaacaactttcagttcagctacacctttgaagacgttcctttccacagcagctacgctcacagccagagtctggatcggctgatgaatcctctgatcgaccagtacctgtattatctgaacaaaacacaatcaaatagtggaactcttcagcagtctcggctactgtttagtcaagctggacccaccagcatgtctcttcaagctaaaaactggctacctggaccttgctacagacagcagcgtctgtcaaagcaggcaaacgacaacaacaacagcaactttccctggactgcggctacaaagtaccacctaaatggccgggactcgttggttaatccaggaccagctatggccagtcacaaagacgatgaagaaaagtttttccccatgcatggaaccctgatatttggtaaacaaggaacaaatgctaacgacgcggatttggacaatgtcatgattacagatgaagaagaaatccgcaccaccaatcccgtggctacggagcagtacggatatgtgtcaaataatttgcaaaactcaaatactggtccaactactggaactgtcaatcaccaaggagcgttacctggcatggtgtggcaggatcgagacgtgtacctgcagggacccatttgggccaagattcctcacaccgatggacactttcatccttctccactgatgggaggttttgggctcaaacacccgcctcctcagatcatgatcaaaaacactcccgttccagccaatcctcccacaaacttcagttctgccaagtttgcttctttcatcacacagtattccacggggcaggtcagcgtggagatcgagtgggagctgcagaaagagaacagcaaacgctggaatcccgaaattcagtacacttccaactacaacaaatctgttaatgtggactttactgtggacactaatggcgtgtattcagagcctcgccccattggcaccagatacctgactcgtaatctgtaa

SEQ ID NO: 327 - DNA, 2217 bp, Artificial Sequence
  Synthetic polynucleotide
atggctgctgacggttatcttccagattggctcgaggacaacctctctgagggcattcgcgagtggtgggacctgaaacctggagcccccaagcccaaggccaaccagcagaagcaggacgacggccggggtctggtgcttcctggctacaagtacctcggacccttcaacggactcgacaagggggagcccgtcaacgcggcggacgcagcggccctcgagcacgacaaggcctacgaccagcagctcaaagcgggtgacaatccgtacctgcggtataaccacgccgacgccgagtttcaggagcgtctgcaagaagatacgtcttttgggggcaacctcgggcgagcagtcttccaggccaagaagcgggttctcgaacctctcggtctggttgaggaagctgctaagacggctcctggaaagaagagaccggtagaaccgtcacctcagcgttcccccgactcctccacgggcatcggcaagaaaggccagcagcccgctaaaaagagactgaactttggtcagactggcgactcagagtcagtccccgaccctcaaccaatcggagaaccacctgcaggcccctctggtctgggatctggtacaatggctgcaggcggtggcgctccaatggcagacaataacgaaggcgccgacggagtgggtagttcctcaggaaattggcattgcgattccacatggctgggcgacagagtcatcaccaccagcacccgaacctgggccctgcccacctacaacaaccacctctacaagcaaatatccaatgggacatcgggagggagcaccaacgacaacacctacttcggctacagcaccccctgggggtattttgacttcaacagattccactgccacttctcaccacgtgactggcagcgactcatcaacaacaactggggattccggccaaaaagactcagcttcaagctcttcaacatccaggtcaaggaggtcacgcagaatgaaggcaccaagaccatcgccaataaccttaccagcacgattcaggtatttacggactcggaataccagctgccgtacgtcctcggctccgcgcaccagggctgcctgcctccgttcccggcggacgtcttcatgattccccagtacggctaccttacactgaacaatggaagtcaagccgtaggccgttcctccttctactgcctggaatattttccatctcaaatgctgcgaactggaaacaattttgaattcagctacaccttcgaggacgtgcctttccacagcagctacgcacacagccagagcttggaccgactgatgaatcctctcatcgaccagtacctgtactacttatccagaactcagtccacaggaggaactcaaggtacccagcaattgttattttctcaagctgggcctgcaaacatgtcggctcaggctaagaactggctacctggaccttgctaccggcagcagcgagtctctacgacactgtcgcaaaacaacaacagcaactttgcttggactggtgccaccaaatatcacctgaacggaagagactctttggtaaatcccggtgtcgccatggcaacccacaaggacgacgaggaacgcttcttcccgtcgagtggagtcctgatgtttggaaaacagggtgctggaagagacaatgtggactacagcagcgttatgctaaccagcgaagaagaaattaaaaccactaaccctgtagccacagaacaatacggtgtggtggctgacaacttgcagcaaaccaatacagggcctattgtgggaaatgtcaacagccaaggagccttacctggcatggtctggcagaaccgagacgtgtacctgcagggtcccatctgggccaagattcctcacacggacggcaactgccacccttcaccgctaatgggaggatttggactgaagcacccacctcctcagatcctgatcaagaacacgccggtacctgcggatcctccaacaacgttcagccaggcgaaattggcttccttcattacgcagtacagcaccggacaggtcagcgtggaaatcgagtgggagctgcagaaggagaacagcaaacgctggaacccagagattcagtacacttcaaactactacaaatctacaaatgtggactttgctgtcaatacagagggaacttattctgagcctcgccccattggtactcgttacctcacccgtaatctgtaa

SEQ ID NO: 328 - protein, 735 aa, Artificial Sequence
  Synthetic polypeptide
MAADGYLPDWLEDTLSEGTRQWWKLKPGPPPPKPAERHKDDSRGLVLPGYKYLGPFNGLDKGEPVNEADAAALEHDKAYDRQLDSGDNPYLKYNHADAEFQERLKEDTSFGGNLGRAVFQAKKRVLEPLGLVEEPVKTAPGKKRPVEHSPAEPDSSSGTGKAGQQPARKRLNFGQTGDADSVPDPQPLGQPPAAPSGLGSTTMATGSGAPMADNNEGADGVGNSSGNWHCDSQWLGDRVITTSTRTWALPTYNNHLYKQISSQSGASNDNHYFGYSTPWGYFDFNRFHCHFSPRDWQRLINNNWGFRPKRLNFKLFNIQVKEVTQNDGTTTIANNLTSTVQVFTDSEYQLPYVLGSAHQGCLPPFPADVFMVPQYGYLTLNNGSQAVGRSSFYCLEYFPSQMLRTGNNFQFSYTFEDVPFHSSYAHSQSLDRLMNPLIDQYLYYLNKTQSNSGTLQQSRLLFSQAGPTSMSLQAKNWLPGPCYRQQRLSKQANDNNNSNFPWTAATKYHLNGRDSLVNPGPAMASHKDDEEKFFPMHGTLIFGKQGTNANDADLDNVMITDEEEIRTTNPVATEQYGYVSNNLQNSNTGPTTGTVNHQGALPGMVWQDRDVYLQGPIWAKIPHTDGHFHPSPLMGGFGLKHPPPQIMIKNTPVPANPPTNFSSAKFASFITQYSTGQVSVEIEWELQKENSKRWNPEIQYTSNYNKSVNVDFTVDTNGVYSEPRPIGTRYLTRNL

SEQ ID NO: 329 - DNA, 2208 bp, Artificial Sequence
  Synthetic polynucleotide
atggctgccgatggttatcttccagattggctcgaggacactctctctgaaggaataagacagtggtggaagctcaaacctggcccaccaccaccaaagcccgcagagcggcatcaggacaacagcaggggtcttgtgcttcctgggtacaagtacctcggaccctccaacggactcgacaaaggagagccggtcaacgaggcagacgccgcggccctcgagcacgacaaggcctacgaccggcagctcgacagcggagacaacccgtacctcaagtacaaccacgccgacgcggagtttcaggagcgtcttaaagaagatacgtcttttgggggcaacctcggacgagcagtcttccaggcgaaaaagagggttcttgaacctctgggcctggttgaggaacctgttaagacggctccgggaaaaaagaggccggtagagcactctcctgtggagccagactcctcctcgggaaccggaaaagcgggccatcagcctgcgagaaagagattgaattttggtcagactggagacgcagactccgtacctgacccccagcctctcggacagccaccagcagcccccacaagtttgggatctactacaatggctacaggcagtggcgcaccaatggcagacaataacgagggtgccgatggagtgggtaattcctcaggaaattggcattgcgattcccaatggctgggcgacagagtcatcaccaccagcacccgaacctgggccctgcccacctacaacaaccacctctacaagcaaatctccagccaatcaggagcctcgaacgacaaccactactttggctgcagcaccccctgggggtattttgacttcaacagattccactgtcacttctccccacgtgattggcaaagactcatcaacaacaactggggattccgacccaagagactcaacttcaagctctttaacattcaagtcaaagaggtcacgcagaatgacggtacgacgacgattgccaataaccttaccagcacggttcaggtgtttactgactcggagtacccgctcccgtacgtcctcggctcggcgcatcaaggatgcctcccgccgtttccagcggacgtcttcatggtcccacagtatggatacctcaccctgaacaacgggagtcaggcggtaggacgctcttccttttactgcctggagtactttccttctcagatgctgcgtaccggaaacaactttaccttcagctacacctttgaggacgttcctttccacagcagctacgctcacagccagagtttggaccggctgatgaatcctctgatcgaccagtatctatattatctgaacaggacacaatcaaatagtggaactcttcagcagtctaggctactgtttagccaagctggacccaccagcatgtctcttcaagctaaaaactggctgcctggaccttgctacagacagcagcgtctttcaaagcaggcaaacgacaacaacaacagcaactttccctggactgcggctacaaagtatcatctaaatggccgggactcgttggttaatccaggaccagctatggccagccacaaagacgatgaagaaaagtttttccccatgcatggaaccctgatatttggtaaacaaggaacaaatgctaacgacgcggatttggagcatgttatgattacagatgaagaagaaatcaggaccaccaatcctgtggctacagagcagtacggaaacgtgtcaaataatttgcaaaactcaaatactggtccaactacagaaaatgtcaatcaccagggagcgttacctggtatggtgtggcaggatcgagacgtgtacctgcagggacccatttgggccaagattcctcacaccgacggacactttcacccttctccactgatgggaggttttggactcaaacacccgcctcctcaaatcatgatcaaaaacactcccgttccagccaatcctcccacaaacttcagttctgccaagtttgcttctttcatcacacagtattccacgggccaggtcagcgtggagattgagtgggagctgcagaaggagaacagcaaacgctggaaccccgagatccagtatacttccaactacaacaaatctgttaatgtggactttactgtggacactaatggtgtgtattcagagccttgccccattggcaccagatacctgactcgtaatctgtaa

SEQ ID NO: 330 - protein, 735 aa, Artificial Sequence
  Synthetic polypeptide
MAADGYLPDWLEDTLSEGIRQWWKLKPGPPPPKPAERHQDNSRGLVLPGYKYLGPSNGLDKGEPVNEADAAALEHDKAYDRQLDSGDNPYLKYNHADAEFQERLKEDTSFGGNLGRAVFQAKKRVLEPLGLVEEPVKTAPGKKRPVEHSPVEPDSSSGTGKAGHQPARKRLNFGQTGDADSVPDPQPLGQPPAAPTSLGSTTMATGSGAPMADNNEGADGVGNSSGNWHCDSQWLGDRVITTSTRTWALPTYNNHLYKQISSQSGASNDNHYFGCSTPWGYFDFNRFHCHFSPRDWQRLINNNWGFRPKRLNFKLFNIQVKEVTQNDGTTTIANNLTSTVQVFTDSEYPLPYVLGSAHQGCLPPFPADVFMVPQYGYLTLNNGSQAVGRSSFYCLEYFPSQMLRTGNNFTFSYTFEDVPFHSSYAHSQSLDRLMNPLIDQYLYYLNRTQSNSGTLQQSRLLFSQAGPTSMSLQAKNWLPGPCYRQQRLSKQANDNNNSNFPWTAATKYHLNGRDSLVNPGPAMASHKDDEEKFFPMHGTLIFGKQGTNANDADLEHVMITDEEEIRTTNPVATEQYGNVSNNLQNSNTGPTTENVNHQGALPGMVWQDRDVYLQGPIWAKIPHTDGHFHPSPLMGGFGLKHPPPQIMIKNTPVPANPPTNFSSAKFASFITQYSTGQVSVEIEWELQKENSKRWNPEIQYTSNYNKSVNVDFTVDTNGVYSEPCPIGTRYLTRNL

SEQ ID NO: 331 - DNA, 2214 bp, Artificial Sequence
  Synthetic polynucleotide
atggctgccgatggttatcttccagattggctcgaggacaaccttagtgaaggaattcgcgagtggtgggctttgaaacctggagcccctcaacccaaggcaaatcaacaacatcaagacaacgctcgaggtcttgtgcttccgggttacaaataccttggacccggcaacggactcgacaagggggagccggtcaacgcagcagacgcggcggccctcgagcacgacaaggcctacgaccagcagctgcaggcgggtgacaatccgtacctgcggtataaccacgccgacgccgagtttcaggagcgtctgcaagaagatacgtcttttgggggcaaccttggcagagcagtcttccaggccaaaaagaggatccttgagcctcttggtctggttgaggaagcagctaaaacggctcctggaaagaagaggcctgtagatcagtctcctcaggaaccggactcatcatctggtgttggcaaatcgggcaaacagcctgccagaaaaagactaaatttcggtcagactggcgactcagagtcagtcccagaccctcaacctctcggagaaccaccagcagcccccacaagtttgggatctaatacaatggcttcaggcggtggcgcaccaatggcagacaataacgagggtgccgatggggtgggtagttcctcgggaaattggcattgcgattcccaatggctgggggacagagtcatcaccaccagcacccgaacctgggccctgcccacctacaacaatcacctctacaagcaaatctccaacgggacatcgggaggagccaccaacgacaacacctacttcggctacagcaccccctgggggtattttgactttaacagattccactgccacttttcaccacgtgactggcagcgactcatcaacaacaactggggattccggcccaagagactcagcttcaagctcttcaacatccaggtcaaggaggtcacgcagaatgaaggcaccaagaccatcgccaataacctcaccagcaccatccaggtgtttacggactcggagtaccagctgccgtacgttctcggctctgcgcaccagggctgcctccctccgttcccggcggacgtgttcatgattccgcaatacggctacctgacgctcaacaatggcagccaagccgtgggacgttcatccttttactgcctggaatatttcccttctcagatgctgagaacgggcaacaactttaccttcagctacacctttgaggaagtgcctttccacagcagctacgcgcacagccagagcttggaccggctgatgaatcctctgattgaccagtacctgtactacttgtctcggactcaaacaacaggaggcacggcaaatacgcagactctgggcttcagccaaggtgggcctaatacaatggccaatcaggcaaagaactggctgccaggaccctgttaccgccaacaacgcgtctcaacgacaaccgggcaaaacaacaatagcaactttgcctggactgctgggaccaaataccatctgaatggaagaaattcattggctaatcctggcatcgctatggcaacacacaaagacgacgaggagcgtttttttcccagtaacgggatcctgatttttggcaaacaaaatgctgccagagacaatgcggattacagcgatgtcatgctcaccagcgaggaagaaatcaaaaccactaaccctgtggctacagaggaatacggtatcgtggcagataacttgcagcagcaaaacacggctcctcaaattggaactgtcaacagccagggggccttacccggtatggtctggcagaaccgggacgtgtacctgcagggtcccatctgggccaagattcctcacacggacggcaacttccacccgtctccgctgatgggcggctttggcctgaaacatcctccgcctcagatcctgatcaagaacacgcctgtacctgcggatcctccgaccaccttcaaccagtcaaagctgaactctttcatcacgcaatacagcaccggacaggtcagcgtggagatcgagtgggagctgcagaaggaaaacagcaagcgctggaacccggagatccagtacacttccaactattacaagtctaataatgttgaatttgctgttaatactgaaggtgtatatagtgaaccccgccccattggcaccagatacctgactcgtaatctgtaa

SEQ ID NO: 332 - protein, 737 aa, Artificial Sequence
  Synthetic polypeptide
MAADGYLPDWLEDNLSEGIREWWALKPGAPQPKANQQHQDNARGLVLPGYKYLGPGNGLDKGEPVNAADAAALEHDKAYDQQLQAGDNPYLRYNHADAEFQERLQEDTSFGGNLGRAVFQAKKRILEPLGLVEEAAKTAPGKKRPVDQSPQEPDSSSGVGKSGKQPARKRLNFGQTGDSESVPDPQPLGEPPAAPTSLGSNTMASGGGAPMADNNEGADGVGSSSGNWHCDSQWLGDRVITTSTRTWALPTYNNHLYKQISNGTSGGATNDNTYFGYSTPWGYFDFNRFHCHFSPRDWQRLINNNWGFRPKRLSFKLFNIQVKEVTQNEGTKTIANNLTSTIQVFTDSEYQLPYVLGSAHQGCLPPFPADVFMIPQYGYLTLNNGSQAVGRSSFYCLEYFPSQMLRTGNNFTFSYTFEEVPFHSSYAHSQSLDRLMNPLIDQYLYYLSRTQTTGGTANTQTLGFSQGGPNTMANQAKNWLPGPCYRQQRVSTTTGQNNNSNFAWTAGTKYHLNGRNSLANPGIAMATHKDDEERFFPSNGILIFGKQNAARDNADYSDVMLTSEEEIKTTNPVATEEYGIVADNLQQQNTAPQIGTVNSQGALPGMVWQNRDVYLQGPIWAKIPHTDGNFHPSPLMGGFGLKHPPPQILIKNTPVPADPPTTFNQSKLNSFITQYSTGQVSVEIEWELQKENSKRWNPEIQYTSNYYKSNNVEFAVNTEGVYSEPRPIGTRYLTRNL

SEQ ID NO: 333 - DNA, 2211 bp, Artificial Sequence
  Synthetic polynucleotide
atggctgccgatggttatcttccagattggctcgaggacaacctctctgagggcattcgcgagtggtgggacttgaaacctggagccccgaagcccaaagccaaccagcaaaagcaggacgacggccggggtctggtgcttcctggctacaagtacctcggacccttcaacggactcgacaagggggagcccgtcaacgcggcggacgcagcggccctcgagcacgacaaggcctacgaccagcagctcaaagcgggtgacaatccgtacctgcggtataaccacgccgacgccgagtttcaggagcgtctgcaagaagatacgtcttttgggggcaacctcgggcgagcagtcttccaggccaagaagcgggttctcgaacctctcggtctggttgaggaaggcgctaagacggctcctggaaagaaacgtccggtagagcagtcgccacaagagccagactcctcctcgggcatcggcaagacaggccagcagcccgctaaaaagagactcaattttggtcagactggcgactcagagtcagtccccgacccacaacctctcggagaacctccagcaacccccgctgctgtgggacctactacaatggcttcaggcggtggcgcaccaatggcagacaataacgaaggcgccgacggagtgggtaatgcctcaggaaattggcattgcgattccacatggctgggcgacagagtcatcaccaccagcacccgaacatgggccttgcccacctataacaaccacctctacaagcaaatctccagtgcttcaacgggggccagcaacgacaaccactacttcggctacagcaccccctgggggtattttgatttcaacagattccactgccatttctcaccacgtgactggcagcgactcatcaacaacaattggggattccggcccaagagactcaacttcaagctcttcaacatccaagtcaaggaggtcacgacgaatgatggcgtcacgaccatcgctaataaccttaccagcacggttcaagtcttctcggactcggagtaccagctgccgtacgttctcggctctgcccaccagggctgcctgcctccgttcccggcggacgtgttcatgattccccagtacggctacctaacactcaacaacggtagtcaggccgtgggacgctcctccttctactgcctggaatactttccttcgcagatgctgagaaccggcaacaacttccagtttacttacaccttcgaggacgtgcctttccacagcagctacgcccacagccagagcttggaccggctgatgaatcctctgattgaccagtacctgtactacttgtctcggactcaaacaacaggaggcacggcaaatacgcagactctgggcttcagccaaggtgggcctaatacaatggccaatcaggcaaagaactggctgccaggaccctgttaccgccaacaacgcgtctcaacgacaaccgggcaaaacaacaatagcaattttacctggactggtgcttcaaaatataacctcaatgggcgtgaatccatcatcaaccctggcactgctatggcctcacacaaagacgacgaagacaagttctttcccatgagcggtgtcatgatttttggaaaagagagcgccggagcttcaaacactgcattggacaatgtcatgattacagacgaagaggaaattaaagccactaaccctgtggccaccgaaagatttgggaccgtggcagtcaatttccagagcagcagcacagaccctgcgaccggagatgtgcatgctatgggagcattacctggcatggtgtggcaagatagagacgtgtacctgcagggtcccatttgggccaaaattcctcacacagatggacactttcacccgtctcctcttatgggcggctttggactcaagaacccgcctcctcagatcctcatcaaaaacacgcctgttcctgcgaatcctccggcggagttttcagctacaaagtttgcttcattcatcacccaatactccacaggacaagtgagtgtggaaattgaatgggagctgcagaaagaaaacagcaagcgctggaatcccgaagtgcagtacacatccaattatgcaaaatctgccaacgttgattttactgtggacaacaatggactttatactgagcctcgccccattggcacccgttacctcacccgtcccctgtaa

SEQ ID NO: 334 - protein, 736 aa, Artificial Sequence
  Synthetic polypeptide
MAADGYLPDWLEDNLSEGIREWWDLKPGAPKPKANQQKQDDGRGLVLPGYKYLGPFNGLDKGEPVNAADAAALEHDKAYDQQLKAGDNPYLRYNHADAEFQERLQEDTSFGGNLGRAVFQAKKRVLEPLGLVEEGAKTAPGKKRPVEQSPQEPDSSSGIGKTGQQPAKKRLNFGQTGDSESVPDPQPLGEPPATPAAVGPTTMASGGGAPMADNNEGADGVGNASGNWHCDSTWLGDRVITTSTRTWALPTYNNHLYKQISSASTGASNDNHYFGYSTPWGYFDFNRFHCHFSPRDWQRLINNNWGFRPKRLNFKLFNIQVKEVTTNDGVTTIANNLTSTVQVFSDSEYQLPYVLGSAHQGCLPPFPADVFMIPQYGYLTLNNGSQAVGRSSFYCLEYFPSQMLRTGNNFQFTYTFEDVPFHSSYAHSQSLDRLMNPLIDQYLYYLSRTQTTGGTANTQTLGFSQGGPNTMANQAKNWLPGPCYRQQRVSTTTGQNNNSNFTWTGASKYNLNGRESIINPGTAMASHKDDEDKFFPMSGVMIFGKESAGASNTALDNVMITDEEEIKATNPVATERFGTVAVNFQSSSTDPATGDVHAMGALPGMVWQDRDVYLQGPIWAKIPHTDGHFHPSPLMGGFGLKNPPPQILIKNTPVPANPPAEFSATKFASFITQYSTGQVSVEIEWELQKENSKRWNPEVQYTSNYAKSANVDFTVDNNGLYTEPRPIGTRYLTRPL

SEQ ID NO: 335 - DNA, 2211 bp, Artificial Sequence
  Synthetic polynucleotide
atggctgctgacggttatcttccagattggctcgaggacaacctttctgaaggcattcgagagtggtgggcgctgcaacctggagcccctaaacccaaggcaaatcaacaacatcaggacaacgctcggggtcttgtgcttccgggttacaaatacctcggacccggcaacggactcgacaagggggaacccgtcaacgcagcggacgcggcagccctcgagcacgacaaggcctacgaccagcagctcaaggccggtgacaacccctacctcaagtacaaccacgccgacgccgagttccaggagcggctcaaagaagatacgtcttttgggggcaacctcgggcgagcagtcttccaggccaaaaagaggcttcttgaacctcttggtctggttgaggaagcggctaagacggctcctggaaagaagaggcctgtagatcagtctcctcaggaaccggactcatcatctggtgttggcaaatcgggcaaacagcctgccagaaaaagactaaatttcggtcagactggcgactcagagtcagtcccagaccctcaacctctcggagaaccaccagcagcccccacaagtttgggatctaatacaatggcttcaggcggtggcgcaccaatggcagacaataacgagggtgccgatggagtgggtaattcctcaggaaattggcattgcgattcccaatggctgggcgacagagtcatcaccaccagcaccagaacctgggccctgcccacttacaacaaccatctctacaagcaaatctccagccaatcaggagcttcaaacgacaaccactactttggctacagcaccccttgggggtattttgactttaacagattccactgccacttctcaccacgtgactggcagcgactcattaacaacaactggggattccggcccaagaaactcagcttcaagctcttcaacatccaagttaaagaggtcacgcagaacgatggcacgacgactattgccaataaccttaccagcacggttcaagtgtttacggactcggagtatcagctcccgtacgtgctcgggtcggcgcaccaaggctgtctcccgccgtttccagcggacgtcttcatggtccctcagtatggatacctcaccctgaacaacggaagtcaagcggtgggacgctcatccttttactgcctggagtacttcccttcgcagatgctaaggactggaaataacttccaattcagctataccttcgaggatgtaccttttcacagcagctacgctcacagccagagtttggatcgcttgatgaatcctcttattgatcagtatctgtactacctgaacagaacgcaaggaacaacctctggaacaaccaaccaatcacggctgctttttagccaggctgggcctcagtctatgtctttgcaggccagaaattggctacctgggccctgctaccggcaacagagactttcaaagactgctaacgacaacaacaacagtaactttccttggacagcggccagcaaatatcatctcaatggccgcgactcgctggtgaatccaggaccagctatggccagtcacaaggacgatgaagaaaaatttttccctatgcacggcaatctaatatttggcaaagaagggacaacggcaagtaacgcagaattagataatgtaatgattacggatgaagaagagattcgtaccaccaatcctgtggcaacagagcagtatggaactgtggcaaataacttgcagagctcaaatacagctcccacgactagaactgtcaatgatcagggggccttacctggcatggtgtggcaagatcgtgacgtgtaccttcaaggacctatctgggcaaagattcctcacacggatggacactttcatccttctcctctgatgggaggctttggactgaaacatccgcctcctcaaatcatgatcaaaaatactccggtaccggcaaatcctccgacgactttcagcccggccaagtttgcttcatttatcactcagtactccactggacaggtcagcgtggaaattgagtgggagctacagaaagaaaacagcaaacgttggaatccagagattcagtacacttccaactacaacaagtctgttaatgtggactttactgtagacactaatggtgtttatagtgaacctcgccccattggcacccgttaccttacccgtcccctgtaa

SEQ ID NO: 336 - protein, 736 aa, Artificial Sequence
  Synthetic polypeptide
MAADGYLPDWLEDNLSEGIREWWALQPGAPKPKANQQHQDNARGLVLPGYKYLGPGNGLDKGEPVNAADAAALEHDKAYDQQLKAGDNPYLKYNHADAEFQERLKEDTSFGGNLGRAVFQAKKRLLEPLGLVEEAAKTAPGKKRPVDQSPQEPDSSSGVGKSGKQPARKRLNFGQTGDSESVPDPQPLGEPPAAPTSLGSNTMASGGGAPMADNNEGADGVGNSSGNWHCDSQWLGDRVITTSTRTWALPTYNNHLYKQISSQSGASNDNHYFGYSTPWGYFDFNRFHCHFSPRDWQRLINNNWGFRPKKLSFKLFNIQVKEVTQNDGTTTIANNLTSTVQVFTDSEYQLPYVLGSAHQGCLPPFPADVFMVPQYGYLTLNNGSQAVGRSSFYCLEYFPSQMLRTGNNFQFSYTFEDVPFHSSYAHSQSLDRLMNPLIDQYLYYLNRTQGTTSGTTNQSRLLFSQAGPQSMSLQARNWLPGPCYRQQRLSKTANDNNNSNFPWTAASKYHLNGRDSLVNPGPAMASHKDDEEKFFPMHGNLIFGKEGTTASNAELDNVMITDEEEIRTTNPVATEQYGTVANNLQSSNTAPTTRTVNDQGALPGMVWQDRDVYLQGPIWAKIPHTDGHFHPSPLMGGFGLKHPPPQIMIKNTPVPANPPTTFSPAKFASFITQYSTGQVSVEIEWELQKENSKRWNPEIQYTSNYNKSVNVDFTVDTNGVYSEPRPIGTRYLTRPL

SEQ ID NO: 337 - DNA, 2211 bp, Artificial Sequence
  Synthetic polynucleotide
atggctgccgatggttatcttccagattggctcgaggacaaccttagtgaaggaattcgcgagtggtgggctttgaaacctggagcccctcaacccaaggcaaatcaacaacatcaagacaacgctcgaggtcttgtgcttccgggttacaaataccttggacccggcaacggactcgacaagggggagccggtcaacgcagcagacgcggcggccctcgagcacgacaaggcctacgaccagcagctcaaggccggagacaacccgtacctcaagtacaaccacgccgacgccgagttccaggagcggctcaaagaagatacgtcttttgggggcaacctcgggcgagcagtcttccaggccaaaaagaggcttcttgaacctcttggtctggttgaggaagcggctaagacggctcctggaaagaagagaccggtagagccatcaccccagcgttctccagactcctctacgggcatcggcaagaaaggccaacagcccgctaaaaagagactcaattttggtcagactggcgactcagagtcagtccccgacccacaacctctcggagaacctccagcaacccccgctgctgtgggacctactacaatggcttcaggcggtggcgcaccaatggcagacaataacgagggtgccgatggagtgggtaattcctcaggaaattggcattgcgattcccaatggctgggcgacagagtcatcaccaccagcaccagaacctgggccctgcccacttacaacaaccatctctacaagcaaatctccagccaatcaggagcttcaaacgacaaccactactttggctacagcaccccttgggggtattttgactttaacagattccactgccacttttcaccacgtgactggcaaagactcatcaacaacaactggggattccgacccaagagactcaacttcaagctcttcaacatccaagtcaaggaggtcacgacgaatgatggcgtcacgaccatcgctaataaccttaccagcacggttcaagtcttctcggactcggagtaccagttgccgtacgtcctcggctctgcgcaccagggctgcctccctccgttcccggcggacgtgttcatgattccgcagtacggctacctaacgctcaacaatggcagccaagccgtgggacgttcatccttttactgcctggaatatttcccttctcagatgctgagaacgggcaacaactttaccttcagctacacttttgaggacgttcctttccacagcagctacgctcacagccagagtctggaccgtctcatgaatcctctcatcgaccagtacctgtattacttgagcagaacaaacactccaagtggaaccaccacgcagtcaaggcttcagttttctcaggccggagcgagtgacattcgggaccagtctaggaactggcttcctggaccctgttaccgccagcagcgcgtttctaaaacaaaaacagacaacaacaacagcaattttacctggactggtgcttcaaaatataaccttaatgggcgtgaatctataatcaaccctggcactgctatggcctcacacaaagacgacgaagacaagttctttcccatgagcggtgtcatgatttttggaaaagagagcgccggagcttcaaacactgcattggacaatgtcatgattacagacgaagaggaaattaaagccactaaccctgtggccaccgaaagatttgggaccgtggcagtcaatttccagagcagcagcacagaccctgcgaccggagatgtgcatgttatgggagccttacctggaatggtgtggcaagacagagacgtatacctgcagggtcctatttgggccaaaattcctcacacggatggacactttcacccgtctcctcttatgggcggctttggactcaagaacccgcctcctcagatcctcatcaaaaacacgcctgttcctgcgaatcctccggcggagttttcagctacaaagtttgcttcattcatcacccaatactccacaggacaagtgagtgtggaaattgaatgggagctgcagaaagaaaacagcaagcgctggaatcccgaagtgcagtacacatccaattatgcaaaatctgccaacgttgattttactgtggacaacaatggactttatactgagcctcgccccattggcacccgttaccttacccgtcccctgtaa

SEQ ID NO: 338 - protein, 736 aa, Artificial Sequence
  Synthetic polypeptide
MAADGYLPDWLEDNLSEGIREWWALKPGAPQPKANQQHQDNARGLVLPGYKYLGPGNGLDKGEPVNAADAAALEHDKAYDQQLKAGDNPYLKYNHADAEFQERLKEDTSFGGNLGRAVFQAKKRLLEPLGLVEEAAKTAPGKKRPVEPSPQRSPDSSTGIGKKGQQPAKKRLNFGQTGDSESVPDPQPLGEPPATPAAVGPTTMASGGGAPMADNNEGADGVGNSSGNWHCDSQWLGDRVITTSTRTWALPTYNNHLYKQISSQSGASNDNHYFGYSTPWGYFDFNRFHCHFSPRDWQRLINNNWGFRPKRLNFKLFNIQVKEVTTNDGVTTIANNLTSTVQVFSDSEYQLPYVLGSAHQGCLPPFPADVFMIPQYGYLTLNNGSQAVGRSSFYCLEYFPSQMLRTGNNFTFSYTFEDVPFHSSYAHSQSLDRLMNPLIDQYLYYLSRTNTPSGTTTQSRLQFSQAGASDIRDQSRNWLPGPCYRQQRVSKTKTDNNNSNFTWTGASKYNLNGRESIINPGTAMASHKDDEDKFFPMSGVMIFGKESAGASNTALDNVMITDEEEIKATNPVATERFGTVAVNFQSSSTDPATGDVHVMGALPGMVWQDRDVYLQGPIWAKIPHTDGHFHPSPLMGGFGLKNPPPQILIKNTPVPANPPAEFSATKFASFITQYSTGQVSVEIEWELQKENSKRWNPEVQYTSNYAKSANVDFTVDNNGLYTEPRPIGTRYLTRPL

SEQ ID NO: 339 - DNA, 2211 bp, Artificial Sequence
  Synthetic polynucleotide
atggctgccgatggttatcttccagattggctcgaggacaacctctctgagggcattcgcgagtggtgggacttgaaacctggagcccctaaacccaaggcaaatcaacaacatcaggacaacgctcgaggtcttgtgcttccgggttacaaataccttggacccggcaacggactcgacaagggggagccggtcaacgcagcagacgcggcggccctcgagcacgacaaggcctacgaccagcagctcaaggccggagacaacccgtacctcaagtacaaccacgccgacgccgagttccaggagcggctcaaagaagatacgtcttttgggggcaacctcgggcgagcagtcttccaggccaaaaagaggcttcttgaacctcttggtctggttgaggaagcggctaagacggctcctggaaagaagagaccggtagagccatcaccccagcgttctccagactcctctacgggcatcggcaagaaaggccaacagcccgctaaaaagagactcaattttggtcagactggcgactcagagtcagtccccgacccacaacctctcggagaacctccagcaacccccgctgctgtgggacctactacaatggcttcaggcggtggcgcaccaatggcagacaataacgagggtgccgatggagtgggtaattcctcaggaaattggcattgcgattcccaatggctgggcgacagagtcatcaccaccagcaccagaacctgggccctgcccacttacaacaaccatctctacaagcaaatctccagccaatcaggagcttcaaacgacaaccactactttggctacagcaccccttgggggtattttgactttaacagattccactgccacttttcaccacgtgactggcaaagactcatcaacaacaactggggattccgacccaagagactcaacttcaagctcttcaacatccaagtcaaggaggtcacgacgaatgatggcgtcacgaccatcgctaataaccttaccagcacggttcaagtcttctcggactcggagtaccagttgccgtacgtcctcggctctgcgcaccagggctgcctccctccgttcccggcggacgtgttcatgattccgcagtacggctacctaacgctcaacaatggcagccaagccgtgggacgttcatccttttactgcctggaatatttcccttctcagatgctgagaacgggcaacaactttaccttcagctacacttttgaggacgttcctttccacagcagctacgctcacagccagagtctggaccgtctcatgaatcccctcatcgaccagtacctgtattacttgagcagaacaaacactccaagtggaaccaccacgcagtcaaggcttcagttttctcaggccggagcgagtgacattcgggaccagtctaggaactggcttcctggaccctgttaccggcagcagcgcgtttctaaaacaaaaacagacaacaacaacagcaactttacctggactggtgcttcaaaatataaccttaatgggcgtgaatctataatcaaccctggcactgctatggcctcacacaaagacgacgaagacaagttctttcccatgagcggtgtcatgatttttggaaaggagagcgccggagcttcaaacactgcattggacaatgtcatgatcacagacgaagaggaaatcaaagccactaaccccgtggccaccgaaagatttgggactgtggcagtcaatctccagagcagcagcacagaccctgcgaccggagatgtgcatgttatgggagccttacctggaatggtgtggcaagacagagacgtgtacctgcagggtcctatttgggccaaaattcctcacacggatggacactttcacccgtctcctctcatgggcggctttggacttaagcacccgcctcctcagatcctcatcaaaaacacgcctgttcctgcgaatcctccggcagagttttcggctacaaagtttgcttcattcatcacccagtattccacaggacaagtgagtgtggaaattgaatgggagctgcagaaagaaaacagcaagcgctggaatcccgaagtgcagtacacatccaattatgcaaaatctgccaacgttgattttactgtggacaacaatggactttatactgagcctcgccccattggcacccgttacctcacccgtcccctgtaa

SEQ ID NO: 340 - protein, 736 aa, Artificial Sequence
  Synthetic polypeptide
MAADGYLPDWLEDNLSEGIREWWDLKPGAPKPKANQQHQDNARGLVLPGYKYLGPGNGLDKGEPVNAADAAALEHDKAYDQQLKAGDNPYLKYNHADAEFQERLKEDTSFGGNLGRAVFQAKKRLLEPLGLVEEAAKTAPGKKRPVEPSPQRSPDSSTGIGKKGQQPAKKRLNFGQTGDSESVPDPQPLGEPPATPAAVGPTTMASGGGAPMADNNEGADGVGNSSGNWHCDSQWLGDRVITTSTRTWALPTYNNHLYKQISSQSGASNDNHYFGYSTPWGYFDFNRFHCHFSPRDWQRLINNNWGFRPKRLNFKLFNIQVKEVTTNDGVTTIANNLTSTVQVFSDSEYQLPYVLGSAHQGCLPPFPADVFMIPQYGYLTLNNGSQAVGRSSFYCLEYFPSQMLRTGNNFTFSYTFEDVPFHSSYAHSQSLDRLMNPLIDQYLYYLSRTNTPSGTTTQSRLQFSQAGASDIRDQSRNWLPGPCYRQQRVSKTKTDNNNSNFTWTGASKYNLNGRESIINPGTAMASHKDDEDKFFPMSGVMIFGKESAGASNTALDNVMITDEEEIKATNPVATERFGTVAVNLQSSSTDPATGDVHVMGALPGMVWQDRDVYLQGPIWAKIPHTDGHFHPSPLMGGFGLKHPPPQILIKNTPVPANPPAEFSATKFASFITQYSTGQVSVEIEWELQKENSKRWNPEVQYTSNYAKSANVDFTVDNNGLYTEPRPIGTRYLTRPL

SEQ ID NO: 341 - DNA, 2214 bp, Artificial Sequence
  Synthetic polynucleotide
atggctgccgatggttatcttccagattggctcgaggacaaccttagtgaaggaattcgcgagtggtgggctttgaaacctggagcccctcaacccaaggcaaatcaacaacatcaagacaacgctcgaggtcttgtgcttccgggttacaaataccttggacccggcaacggactcgacaagggggagccggtcaacgcagcagacgcggcggccctcgagcacgacaaggcctacgaccagcagctgcaggcgggtgacaatccgtacctgcggtataaccacgccgacgccgagtttcaggagcgtctgcaagaagatacgtcttttgggggcaaccttggcagagcagtcttccaggccaaaaagaggatccttgagcctcttggtctggttgaggaagcagctaaaacggctcctggaaagaagaggcctgtagatcagtctcctcaggaaccggactcatcatctggtgttggcaaatcgggcaaacagcctgccagaaaaagactaaatttcggtcagactggcgactcagagtcagtcccagaccctcaacctctcggagaaccaccagcagcccccacaagtttgggatctaatacaatggcttcaggcggtggcgcaccaatggcagacaataacgagggtgccgatggggtgggtagttcctcgggaaattggcattgcgattcccaatgactgggggacagagtcatcaccaccagcacccgaacctgggccctgcccacctacaacaatcacctctacaagcaaatctccaacgggacatcgggaggagccaccaacgacaacacctacttcggctacagcaccccctgggggtattttgactttaacagattccactgccacttttcaccacgtgactggcagcgactcatcaacaacaactggggattccggcccaagagactcagcttcaagctcttcaacatccaggtcaaggaggtcacgcagaatgaaggcaccaagaccatcgccaataacctcaccagcaccatccaggtgtttacggactcggagtaccagctgccgtacgttctcggctctgcgcaccagggctgcctccctccgttcccggcggacgtgttcatgattccgcaatacggctacctgacgctcaacaatggcagccaagccgtgggacgttcatccttttactgcctggaatatttcccttctcagatgctgagaacgggcaacaactttaccttcagctacacctttgaggaagtgcctttccacagcagctacgcgcacagccagagcttggaccggctgatgaatcctctgattgaccagtacctgtactacttgtctcggactcaaacaacaggaggcacggcaaatacgcagactctgggcttcagccaaggtgggcctaatacaatggccaatcaggcaaagaactggctgccaggaccctgttaccgccaacaacgcgtctcaacgacaaccgggcaaaacaacaatagcaactttgcctggactgctgggaccaaataccatctgaatggaagaaattcattggctaatcctggcatcgctatggcaacacacaaagacgacgaggagcgtttttttcccagtaacgggatcctgatttttggcaaacaaaatgctgccagagacaatgcggattacagcgatgtcatgctcaccagcgaggaagaaatcaaaaccactaaccctgtggctacagaggaatacggtatcgtggcagataacttgcagcagcaaaacacggctcctcaaattggaactgtcaacagccagggggccttacccggtatggtctggcagaaccgggacgtgtacctgcagggtcccatctgggccaagattcctcacacggacggcaacttccacccgtctccgctgatgggcggctttggcctgaaacatcctccgcctcagatcctgatcaagaacacgcctgtacctgcggatcctccgaccaccttcaaccagtcaaagctgaactctttcatcacgcaatacagcaccggacaggtcagcgtggagatcgagtgggagctgcagaaggaaaacagcaagcgctggaacccggagatccagtacacttccaactattacaagtctaataatgttgaatttgctgttaatactgaaggtgtatatagtgaaccccgccccattggcaccagatacctgactcgtaatctgtaa

SEQ ID NO: 342 - protein, 736 aa, Artificial Sequence
  Synthetic polypeptide
MAADGYLPDWLEDNLSEGIREWWALKPGAPQPKANQQHQDNARGLVLPGYKYLGPGNGLDKGEPVNAADAAALEHDKAYDQQLQAGDNPYLRYNHADAEFQERLQEDTSFGGNLGRAVFQAKKRILEPLGLVEEAAKTAPGKKRPVDQSPQEPDSSSGVGKSGKQPARKRLNFGQTGDSESVPDPQPLGEPPAAPTSLGSNTMASGGGAPMADNNEGADGVGSSSGNWHCDSQLGDRVITTSTRTWALPTYNNHLYKQISNGTSGGATNDNTYFGYSTPWGYFDFNRFHCHFSPRDWQRLINNNWGFRPKRLSFKLFNIQVKEVTQNEGTKTIANNLTSTIQVFTDSEYQLPYVLGSAHQGCLPPFPADVFMIPQYGYLTLNNGSQAVGRSSFYCLEYFPSQMLRTGNNFTFSYTFEEVPFHSSYAHSQSLDRLMNPLIDQYLYYLSRTQTTGGTANTQTLGFSQGGPNTMANQAKNWLPGPCYRQQRVSTTTGQNNNSNFAWTAGTKYHLNGRNSLANPGIAMATHKDDEERFFPSNGILIFGKQNAARDNADYSDVMLTSEEEIKTTNPVATEEYGIVADNLQQQNTAPQIGTVNSQGALPGMVWQNRDVYLQGPIWAKIPHTDGNFHPSPLMGGFGLKHPPPQILIKNTPVPADPPTTFNQSKLNSFITQYSTGQVSVEIEWELQKENSKRWNPEIQYTSNYYKSNNVEFAVNTEGVYSEPRPIGTRYLTRNL

SEQ ID NO: 343 - DNA, 2214 bp, Artificial Sequence
  Synthetic polynucleotide
atggctgccgatggttatcttccagattggctcgaggacaaccttagtgaaggaattcgcgagtggtgggctttgaaacctggagcccctcaacccaaggcaaatcaacaacatcaagacaacgctcgaggtcttgtgcttccgggttacaaataccttggacccggcaacggactcgacaagggggagccggtcaacgcagcagacgcggcggccctcgagcacgacaaggcctacgaccagcagctgcaggcgggtgacaatccgtacctgcggtataaccacgccgacgccgagtttcaggagcgtctgcaagaagatacgtcttttgggggcaaccttggcagagcagtcttccaggccaaaaagaggatccttgagcctcttggtctggttgaggaagcagctaaaacggctcctggaaagaagaggcctgtagatcagtctcctcaggaaccggactcatcatctggtgttggcaaatcgggcaaacagcctgccagaaaaagactaaatttcggtcagactggcgactcagagtcagtcccagaccctcaacctctcggagaaccaccagcagcccccacaagtttgggatctaatacaatggcttcaggcggtggcgcaccaatggcagacaataacgagggtgccgatggggtgggtagttcctcgggaaattggcattgcgattcccaatggctgggggacagagtcatcaccaccagcacccgaacctgggccctgcccacctacaacaatcacctctacaagcaaatctccaacgggacatcgggaggagccaccaacgacaacacctacttcggctacagcaccccctgggggtattttgactttaacagattccactgccacttttcaccacgtgactggcagcgactcatcaacaacaactggggattccggcccaagagactcagcttcaagctcttcaacatccaggtcaaggaggtcacgcagaatgaaggcaccaagaccatcgccaataacctcaccagcaccatccaggtgtttacggactcggagtaccagctgccgtacgttctcggctctgcgcaccagggctgcctccctccgttcccggcggacgtgttcatgattccgcaatacggctacctgacgctcaacaatggcagccaagccgtgggacgttcatccttttactgcctggaatatttcccttctcagatgctgagaacgggcaacaactttaccttcagctacacctttgaggaagtgccttttcacagcagctacgcgcacagccagagcttggaccggctgatgaatcctctgattgaccagtacctgtactacttgtctcggactcaaacaacaggaggcacggcaaatacgcagactctgggcttcagccaaggtgggcctaatacaatggccaatcaggcaaagaactggctgccaggaccctgttaccgccaacaacgcgtctcaacgacaaccgggcaaaacaacaatagcaactttgcctggactgctgggaccaaataccatctgaatggaagaaattcattggctaatcctggcatcgctatggcaacacacaaagacgacgaggagcgtttttttcccagtaacgggatcctgatttttggcaaacaaaatgctgccagagacaatgcggattacagcgatgtcatgctcaccagcgaggaagaaatcaaaaccactaaccctgtggctacagaggaatacggtatcgtggcagataacttgcagcagcaaaacacggctcctcaaattggaactgtcaacagccagggggccttacccggtatggtctggcagaaccgggacgtgtacctgcagggtcccatctgggccaagattcctcacacggacggcaacttccacccgtctccgctgatgggcggctttggcctgaaacatcctccgcctcagatcctgatcaagaacacgcctgtacctgcggatcctccgaccaccttcaaccagtcaaagctgaactctttcatcacgcaatacagcaccggacaggtcagcgtggagatcgagtgggagctgcagaaggaaaacagcaagcgctggaacccggagatccagtacacttccaactattacaagtctaataatgttgaatttgctgttaatactgaaggtgtatatagtgaaccccgccccattggcaccagatacctgactcgtaatctgtaa

SEQ ID NO: 344 - protein, 737 aa, Artificial Sequence; identical to SEQ ID NO: 332
  Synthetic polypeptide

SEQ ID NO: 345 - DNA, 2211 bp, Artificial Sequence
  Synthetic polynucleotide
atggctgccgatggttatcttccagattggctcgaggacaacctctctgagggcattcgcgagtggtgggacttgaaacctggagcccctaaacccaaggcaaatcaacaacatcaggacaacgctcgaggtcttgtgcttccgggttacaaataccttggacccggcaacggactcgacaagggggagccggtcaacgcagcagacgcggcggccctcgagcacgacaaggcctacgaccagcagctcaaggccggagacaacccgtacctcaagtacaaccacgccgacgccgagttccaggagcggctcaaagaagatacgtcttttgggggcaacctcgggcgagcagtcttccaggccaaaaagaggcttcttgaacctcttggtctggttgaggaagcggctaagacggctcctggaaagaagagaccggtagagccatcaccccagcgttctccagactcctctacgggcatcggcaagaaaggccaacagcccgctaaaaagagactcaattttggtcagactggcgactcagagtcagtccccgacccacaacctctcggagaacctccagcaacccccgctgctgtgggacctactacaatggcttcaggcggtggcgcaccaatggcagacaataacgagggtgccgatggagtgggtaattcctcaggaaattggcattgcgattcccaatggctgggcgacagagtcatcaccaccagcaccagaacctgggccctgcccacttacaacaaccatctctacaagcaaatctccagccaatcaggagcttcaaacgacaaccactactttggctacagcaccccttgggggtattttgactttaacagattccactgccacttttcaccacgtgactggcaaagactcatcaacaacaactggggattccgacccaagagactcaacttcaagctcttcaacatccaagtcaaggaggtcacgacgaatgatggcgtcacgaccatcgctaataaccttaccagcacggttcaagtcttctcggactcggagtaccagttgccgtacgtcctcggctctgcgcaccagggctgcctccctccgttcccggcggacgtgttcatgattccgcagtacggctacctaacgctcaacaatggcagccaagccgtgggacgttcatccttttactgcctggaatatttcccttctcagatgctgagaacgggcaacaactttaccttcagctacacttttgaggacgttcctttccacagcagctacgctcacagccagagtctggaccgtctcatgaatcctctcatcgaccagtacctgtattacttgagcagaacaaacactccaagtggaaccaccacgcagtcaaggcttcagttttctcaggccggagcgagtgacattcgggaccagtctaggaactggcttcctggaccctgttaccgccagcagcgcgtttctaaaacaaaaacagacaacaacaacagcaattttacctggactggtgcttcaaaatataaccttaatgggcgtgaatctataatcaaccctggcactgctatggcctcacacaaagacgacgaagacaagttctttcccatgagcggtgtcatgatttttggaaaagagagcgccggagcttcaaacactgcattggacaatgtcatgattacagacgaagaggaaattaaagccactaaccctgtggccaccgaaagatttgggaccgtggcagtcaatttccagagcagcagcacagaccctgcgaccggagatgtgcatgctatgggagcattacctggcatggtgtggcaagatagagacgtgtacctgcagggtcccatttgggccaaaattcctcacacagatggacactttcacccgtctcctcttatgggcggctttggactcaagaacccgcctcctcagatcctcatcaaaaacacgcctgttcctgcgaatcctccggcggagttttcagctacaaagtttgcttcattcatcacccaatactccacaggacaagtgagtgtggaaattgaatgggagctgcagaaagaaaacagcaagcgctggaatcccgaagtgcagtacacatccaattatgcaaaatctgccaacgttgattttactgtggacaacaatggactttatactgagcctcgccccattggcacccgttaccttacccgtcccctgtaa

SEQ ID NO: 346 - protein, 736 aa, Artificial Sequence
  Synthetic polypeptide
MAADGYLPDWLEDNLSEGIREWWDLKPGAPKPKANQQHQDNARGLVLPGYKYLGPGNGLDKGEPVNAADAAALEHDKAYDQQLKAGDNPYLKYNHADAEFQERLKEDTSFGGNLGRAVFQAKKRLLEPLGLVEEAAKTAPGKKRPVEPSPQRSPDSSTGIGKKGQQPAKKRLNFGQTGDSESVPDPQPLGEPPATPAAVGPTTMASGGGAPMADNNEGADGVGNSSGNWHCDSQWLGDRVITTSTRTWALPTYNNHLYKQISSQSGASNDNHYFGYSTPWGYFDFNRFHCHFSPRDWQRLINNNWGFRPKRLNFKLFNIQVKEVTTNDGVTTIANNLTSTVQVFSDSEYQLPYVLGSAHQGCLPPFPADVFMIPQYGYLTLNNGSQAVGRSSFYCLEYFPSQMLRTGNNFTFSYTFEDVPFHSSYAHSQSLDRLMNPLIDQYLYYLSRTNTPSGTTTQSRLQFSQAGASDIRDQSRNWLPGPCYRQQRVSKTKTDNNNSNFTWTGASKYNLNGRESIINPGTAMASHKDDEDKFFPMSGVMIFGKESAGASNTALDNVMITDEEEIKATNPVATERFGTVAVNFQSSSTDPATGDVHAMGALPGMVWQDRDVYLQGPIWAKIPHTDGHFHPSPLMGGFGLKNPPPQILIKNTPVPANPPAEFSATKFASFITQYSTGQVSVEIEWELQKENSKRWNPEVQYTSNYAKSANVDFTVDNNGLYTEPRPIGTRYLTRPL

SEQ ID NO: 347 - DNA, 2211 bp, Artificial Sequence
  Synthetic polynucleotide
atggctgccgatggttatcttccagattggctcgaggacaaccttagtgaaggaattcgcgagtggtgggcgctgaaacctggagccccgaagcccaaagccaaccagcaaaagcaggacgacggccggggtctggtgcttccgggttacaaatacctcggacccggtaacggactcgacaaaggagagccggtcaacgaggcggacgcggcagccctcgagcacgacaaggcctacgaccagcagctcaaagcgggtgacaatccgtacctgcggtataaccacgccgacgccgagtttcaggagcgtctgcaagaagatacgtcttttgggggcaacctcgggcgagcagtcttccaggccaagaagcgggttctcgaacctctcggtctggttgaggaaggcgctaagacggctcccggaaagaaacgtccggtagagcagtcgccacaagagccagactcctctacgggcatcggcaagaaaggccaacagcccgccagaaaaagactcaatttcggtcagactggcgactcagagtcagttccagaccctcaacctctcggagaacctccagcagcgccctctggtgtgggacctactacaatggcttcaggcggtggcgcaccaatggcagacaataacgaaggcgccgacggagtgggtaatgcctcaggaaattggcattgcgattccacatggctgggcgacagagtcatcaccaccagcacccgaacatgggccttgcccacctataacaaccacctctacaagcaaatctccagtgcttcaacgggggccagcaacgacaacacctacttcggctacagcaccccctgggggtattttgatttcaacagattccactgccatttctcaccacgtgactggcagcgactcatcaacaacaattggggattccggcccaagagactcaacttcaaactcttcaacatccaagtcaaggaggtcacgacgaatgatggcgtcacgaccatcgctaataaccttaccagcacggttcaagtcttctcggactcggagtaccagttgccgtacgtcctcggctctgcgcaccagggctgcctccctccgttcccggcggacgtgttcatgattccgcagtacggctacctaacgctcaacaatggcagccaggcagtgggacggtcatccttttactgcctggaatatttcccatcgcagatgctgagaacgggcaataactttaccttcagctacaccttcgaggacgtgcctttccacagcagctacgcgcacagccagagcctggaccggctgatgaatcctctcatcgaccagtacctgtattacctgaacagaactcagaatcagtccggaagtgcccaaaacaaggacttgctgtttagccgggggtctccagctggcatgtctgttcagcccaaaaactggctacctggaccctgttatcggcagcagcgcgtttctaaaacaaaaacagacaacaacaacagcaattttacctggactggtgcttcaaaatataacctcaatgggcgtgaatccatcatcaaccctggcactgctatggcctcacacaaagacgacgaagacaagttctttcccatgagcggtgtcatgatttttggaaaagagagcgccggagcttcaaacactgcattggacaatgtcatgattacagacgaagaggaaattaaagccactaaccctgtggccaccgaaagatttgggaccgtggcagtcaatttccagagcagcagcacagaccctgcgaccggagatgtgcatgttatgggagccttacctggaatggtgtggcaagacagagacgtatacctgcagggtcctatttgggccaaaattcctcacacagatggacactttcacccgtctcctcttatgggcggctttggactcaagaacccgcctcctcagatcctcatcaaaaacacgcctgttcctgcgaatcctccggcagagttttcggctacaaagtttgcttcattcatcacccagtattccacaggacaagtgagcgtggagattgaatgggagctgcagaaagaaaacagcaaacgctggaatcccgaagtgcagtatacatctaactatgcaaaatctgccaacgttgatttcactgtggacaacaatggactttatactgagcctcgccccattggcacccgttacctcacccgtcccctgtaa

SEQ ID NO: 348 - protein, 736 aa, Artificial Sequence
  Synthetic polypeptide
MAADGYLPDWLEDNLSEGIREWWALKPGAPKPKANQQKQDDGRGLVLPGYKYLGPGNGLDKGEPVNEADAAALEHDKAYDQQLKAGDNPYLRYNHADAEFQERLQEDTSFGGNLGRAVFQAKKRVLEPLGLVEEGAKTAPGKKRPVEQSPQEPDSSTGIGKKGQQPARKRLNFGQTGDSESVPDPQPLGEPPAAPSGVGPTTMASGGGAPMADNNEGADGVGNASGNWHCDSTWLGDRVITTSTRTWALPTYNNHLYKQISSASTGASNDNTYFGYSTPWGYFDFNRFHCHFSPRDWQRLINNNWGFRPKRLNFKLFNIQVKEVTTNDGVTTIANNLTSTVQVFSDSEYQLPYVLGSAHQGCLPPFPADVFMIPQYGYLTLNNGSQAVGRSSFYCLEYFPSQMLRTGNNFTFSYTFEDVPFHSSYAHSQSLDRLMNPLIDQYLYYLNRTQNQSGSAQNKDLLFSRGSPAGMSVQPKNWLPGPCYRQQRVSKTKTDNNNSNFTWTGASKYNLNGRESIINPGTAMASHKDDEDKFFPMSGVMIFGKESAGASNTALDNVMITDEEEIKATNPVATERFGTVAVNFQSSSTDPATGDVHVMGALPGMVWQDRDVYLQGPIWAKIPHTDGHFHPSPLMGGFGLKNPPPQILIKNTPVPANPPAEFSATKFASFITQYSTGQVSVEIEWELQKENSKRWNPEVQYTSNYAKSANVDFTVDNNGLYTEPRPIGTRYLTRPL

SEQ ID NO: 349 - DNA, 2205 bp, Artificial Sequence
  Synthetic polynucleotide
atggctgctgacggttatcttccagattggctcgaggacaacctttctgaaggcattcgtgagtggtgggctctgaaacctggagtccctcaacccaaagcgaaccaacaacaccaggacaaccgtcggggtcttgtgcttccgggttacaaatacctcggacccggtaacggactcgacaaaggagagccggtcaacgaggcggacgcggcagccctcgaacacgacaaggcctacgaccagcagctcaaggccggagacaacccgtacctcaagtacaaccacgccgacgccgagttccaggagcggctcaaagaagatacgtcttttgggggcaacctcgggcgagcagtcttccaggccaaaaagaggcttcttgaacctcttggtctggttgaggaagcggctaagacggctcctggaaagaagaggcctgtagagcagtctcctcaggaaccggactcctccgcgggtattggcaaatcgggtgcacagcccgctaaaaagagactcaatttcggtcagactggcgacacagagtcagtcccagaccctcaaccaatcggagaacctcccgcagccccctcaggtgtgggatctcttacaatggcttcaggtggtggcgcaccagtggcagacaataacgaaggtgccgatggagtgggtagttcctcgggaaattggcattgcgattcccaatggctgggggacagagtcatcaccaccagcacccgaacctgggccctgcccacctacaacaaccacctctacaaacaaatttccagccaatcaggagcctcgaacgacaatcactactttggctacagcaccccttgggggtattttgacttcaacagattccactgccacttttcaccacgtgactggcagcgactcatcaacaacaactggggattccggcccaagagactcagcttcaagctcttcaacatccaggtcaaagaggttacggacaacaatggagtcaagaccatcgccaataaccttaccagcacggtccaggtcttcacggactcagactatcagctcccgtacgtgctcgggtcggctcacgagggctgcctcccgccgttcccagcggacgttttcatgattcctcagtacgggtatctgacgcttaatgatggaagccaggccgtgggtcgttcgtccttttactgcctggaatatttcccgtcgcaaatgctaagaacgggtaacaacttccagttcagctacgagtttgagaacgtacctttccatagcagctacgctcacagccaaagcctggaccgactaatgaatccactcatcgaccaatacttgtactatctctcaaagactattaacggttctggacagaatcaacaaacgctaaaattcagtgtggccggacccagcaacatggctgtccagggaagaaactacatacctggacccagctaccgacaacaacgtgtctcaaccactgtgactcaaaacaacaacagcgaatttgcttggcctggagcttcttcttgggctctcaatggacgtaatagcttgatgaatcctggacctgctatggccagccacaaagaaggagaggaccgtttctttcctttgtctggatctttaatttttggcaaacaaggaactggaagagacaacgtggatgcggacaaagtcatgataaccaacgaagaagaaattaaaactactaacccggtagcaacggagtcctatggacaagtggccacaaaccaccagagtgcccaagcacaggcgcagaccggctgggttcaaaaccaaggaatacttccgggtatggtttggcaggacagagatgtgtacctgcaaggacccatctgggccaagattcctcacacggacggcaacttccacccgtctccgctgatgggcggctttggcctgaaacatcctccgcctcagatcctgatcaagaacacgcctgtacctgcggatcctccgaccaccttcaaccagtcaaagctgaactctttcatcacgcaatacagcaccggacaggtcagcgtggaaattgaatgggagctgcagaaggaaaacagcaagcgctggaatcccgaagtgcagtatacatctaactatgcaaaatctgccaacgttgatttcactgtggacaacaatggactttatactgagcctcgccccattggcacccgttacctcacccgtcccctgtaa

SEQ ID NO: 350 - protein, 734 aa, Artificial Sequence
  Synthetic polypeptide
MAADGYLPDWLEDNLSEGIREWWALKPGVPQPKANQQHQDNRRGLVLPGYKYLGPGNGLDKGEPVNEADAAALEHDKAYDQQLKAGDNPYLKYNHADAEFQERLKEDTSFGGNLGRAVFQAKKRLLEPLGLVEEAAKTAPGKKRPVEQSPQEPDSSAGIGKSGAQPAKKRLNFGQTGDTESVPDPQPIGEPPAAPSGVGSLTMASGGGAPVADNNEGADGVGSSSGNWHCDSQWLGDRVITTSTRTWALPTYNNHLYKQISSQSGASNDNHYFGYSTPWGYFDFNRFHCHFSPRDWQRLINNNWGFRPKRLSFKLFNIQVKEVTDNNGVKTIANNLTSTVQVFTDSDYQLPYVLGSAHEGCLPPFPADVFMIPQYGYLTLNDGSQAVGRSSFYCLEYFPSQMLRTGNNFQFSYEFENVPFHSSYAHSQSLDRLMNPLIDQYLYYLSKTINGSGQNQQTLKFSVAGPSNMAVQGRNYIPGPSYRQQRVSTTVTQNNNSEFAWPGASSWALNGRNSLMNPGPAMASHKEGEDRFFPLSGSLIFGKQGTGRDNVDADKVMITNEEEIKTTNPVATESYGQVATNHQSAQAQAQTGWVQNQGILPGMVWQDRDVYLQGPIWAKIPHTDGNFHPSPLMGGFGLKHPPPQILIKNTPVPADPPTTFNQSKLNSFITQYSTGQVSVEIEWELQKENSKRWNPEVQYTSNYAKSANVDFTVDNNGLYTEPRPIGTRYLTRPL

SEQ ID NO: 351 - DNA, 2211 bp, Artificial Sequence
  Synthetic polynucleotide
atggctgccgatggttatcttccagattggctcgaggacaacctctctgagggcattcgcgagtggtgggcgctgaaacctggagccccgaagcccaaagccaaccagcaaaagcaggacgacggccggggtctggtgcttcctggctacaagtacctcggacccttcaacggactcgacaagggggagcccgtcaacgcggcggacgcagcggccctcgagcacgacaaggcctacgaccagcagctgcaggcgggtgacaatccgtacctgcggtataaccacgccgacgccgagtttcaggagcgtctgcaagaagatacgtcttttgggggcaacctcgggcgagcagtcttccaggccaagaagtgggttctcgaacctctcggtctggttgaggaaggcgctaagacggctcctggaaagaaacgtccggtagagcagtcgccacaagagccagactcctcctcgggcatcggcaagacaggccagcagcccgctaaaaagagactcaattttggtcagactggcgactcagagtcagtccccgacccacaacctctcggagaacctccagcaacccccgctgctgtgggacctactacaatggcttcaggcggtggcgcaccaatggcagacaataacgaaggcgccgacggagtgggtaatgcctcaggaaattggcattgcgattccacatggctgggcgacagagtcatcaccaccagcacccgcacctgggccttgcccacctacaataaccacctctacaagcaaatctccagtgcttcaacgggggccagcaacgacaaccactacttcggctacagcaccccctgggggtattttgatttcaacagattccactgccatttctcaccacgtgactggcagcgactcatcaacaacaattggggattccggcccaagagactcaacttcaagctcttcaacatccaagtcaaggaggtcacgacgaatgatggcgtcacaaccatcgctaataaccttaccagcacggttcaagtcttctcggactcggagtaccagcttccgtacgtcctcggctctgcgcaccagggctgcctccctccgttcccggcggacgtgttcatgattccgcaatacggctacctgacgctcaacaatggcagccaagccgtgggacgttcatccttttactgcctggaatatttcccttctcagatgctgagaacgggcaacaactttaccttcagctacacctttgaggaagtgcctttccacagcagctacgcgcacagccagagcctggaccggctgatgaatcctctcatcgaccaatacctgtattacctgaacagaactcaaaatcagtccggaagtgcccaaaacaaggacttgctgtttagccgtgggtctccagctggcatgtctgttcagcccaaaaactggctacctggaccctgttatcggcagcagcgcgtttctaaaacaaaaacagacaacaacaacagcaattttacctggactggtgcttcaaaatataacctcaatgggcgtgaatccatcatcaaccctggcactgctatggcctcacacaaagacgacgaagacaagttctttcccatgagcggtgtcatgatttttggaaaggagagcgccggagcttcaaacactgcattggacaatgtcatgatcaccgacgaagaggaaatcaaagccactaaccccgtggccaccgaaagatttgggactgtggcagtcaatctccagagcagcagcacagaccctgcgaccggagatgtgcatgttatgggagccttacctggcatggtgtggcaagatagagacgtgtacctgcagggtcccatttgggccaaaattcctcacacagatggacactttcacccgtctcctcttatgggcggctttggactcaagaacccgcctcctcagatcctcatcaaaaacacgcctgttcctgcgaatcctccggcggagttttcagctacaaagtttgcttcattcatcacccaatactccacaggacaagtgagtgtggaaattgaatgggagctgcagaaagaaaacagcaagcgctggaatcccgaagtgcagtacacatccaattatgcaaaatctgccaacgttgattttactgtggacaacaatggactttatactgagcctcgccccattggcacccgttacctcacccgtcccctgtaa

SEQ ID NO: 352 - protein, 736 aa, Artificial Sequence
  Synthetic polypeptide
MAADGYLPDWLEDNLSEGIREWWALKPGAPKPKANQQKQDDGRGLVLPGYKYLGPFNGLDKGEPVNAADAAALEHDKAYDQQLQAGDNPYLRYNHADAEFQERLQEDTSFGGNLGRAVFQAKKWVLEPLGLVEEGAKTAPGKKRPVEQSPQEPDSSSGIGKTGQQPAKKRLNFGQTGDSESVPDPQPLGEPPATPAAVGPTTMASGGGAPMADNNEGADGVGNASGNWHCDSTWLGDRVITTSTRTWALPTYNNHLYKQISSASTGASNDNHYFGYSTPWGYFDFNRFHCHFSPRDWQRLINNNWGFRPKRLNFKLFNIQVKEVTTNDGVTTIANNLTSTVQVFSDSEYQLPYVLGSAHQGCLPPFPADVFMIPQYGYLTLNNGSQAVGRSSFYCLEYFPSQMLRTGNNFTFSYTFEEVPFHSSYAHSQSLDRLMNPLIDQYLYYLNRTQNQSGSAQNKDLLFSRGSPAGMSVQPKNWLPGPCYRQQRVSKTKTDNNNSNFTWTGASKYNLNGRESIINPGTAMASHKDDEDKFFPMSGVMIFGKESAGASNTALDNVMITDEEEIKATNPVATERFGTVAVNLQSSSTDPATGDVHVMGALPGMVWQDRDVYLQGPIWAKIPHTDGHFHPSPLMGGFGLKNPPPQILIKNTPVPANPPAEFSATKFASFITQYSTGQVSVEIEWELQKENSKRWNPEVQYTSNYAKSANVDFTVDNNGLYTEPRPIGTRYLTRPL

SEQ ID NO: 353 - DNA, 2214 bp, Artificial Sequence
  Synthetic polynucleotide
atggctgccgatggttatcttccagattggctcgaggacaaccttagtgaaggaattcgcgagtggtgggctttgaaacctggagcccctcaacccaaggcaaatcaacaacatcaagacaacgctcgaggtcttgtgcttccgggttacaaataccttggacccggcaacggactcgacaagggggagccggtcaacgcagcagacgcggcggccctcgagcacgacaaggcctacgaccagcagctgcaggcgggtgacaatccgtacctgcggtataaccacgccgacgccgagtttcaggagcgtctgcaagaagatacgtcttttgggggcaaccttggcagagcagtcttccaggccaaaaagaggatccttgagcctcttggtctggttgaggaagcagctaaaacggctcctggaaagaagaggcctgtagatcagtctcctcaggaaccggactcatcatctggtgttggcaaatcgggcaaacagcctgccagaaaaagactaaatttcggtcagactggcgactcagagtcagtcccagaccctcaacctctcggagaaccaccagcagcccccacaagtttgggatctaatacaatggcttcaggcggtggcgcaccaatggcagacaataacgagggtgccgatggggtgggtagttcctcgggaaattggcattgcgattcccaatggctgggggacagagtcatcaccaccagcacccgaacctgggccctgcccacctacaacaatcacctctacaagcaaatctccaacgggacatcgggaggagccaccaacgacaacacctacttcggctacagcaccccctgggggtattttgactttaacagattccactgccacttttcaccacgtgactggcagcgactcatcaacaacaactggggattccggcccaagagactcagcttcaagctcttcaacatccaggtcaaggaggtcacgcagaatgaaggcaccaagaccatcgccaataacctcaccagcaccatccaggtgtttacggactcggagtaccagctgccgtacgttctcggctcggcgcaccagggctgcctccctccgttcccggcggacgtcttcatggtgccacagtatggatacctgacgctcaacaatggcagccaagccgtgggacgttcatccttttactgcctggaatatttcccttctcagatgctgagaacgggcaacaactttaccttcagctacacctttgaggaagtgcctttccacagcagctacgcgcacagccagagcttggaccggctgatgaatcctctgattgaccagtacctgtactacttgtctcggactcaaacaacaggaggcacggcaaatacgcagactctgggcttcagccaaggtgggcctaatacaatggccaatcaggcaaagaactggctgccaggaccctgttaccgccaacaacgcgtctcaacgacaaccgggcaaaacaacaatagcaactttgcctggactgctgggaccaaataccatctgaatggaagaaattcattggctaatcctggcatcgctatggcaacacacaaagacgacgaggagcgtttttttcccagtaacgggatcctgatttttggcaaacaaaatgctgccagagacaatgcggattacagcgatgtcatgctcaccagcgaggaagaaatcaaaaccactaaccctgtggctacagaggaatacggtatcgtggcagataacttgcagcagcaaaacacggctcctcaaattggaactgtcaacagccagggggacttacccggtatggtctggcagaaccgggacgtgtacctgcagggtcccatctgggccaagattcctcacacggacggcaacttccacccgtctccgctgatgggcggctttggcctgaaacatcctccgcctcagatcctgatcaagaacacgcctgtacctgcggatcctccgaccaccttcaaccagtcaaagctgaactctttcatcacgcaatacagcaccggacaggtcagcgtggagatcgagtgggagctgcagaaggaaaacagcaagcgctggaacccggagatccagtacacttccaactattacaagtctaataatgttgaatttgctgttaatactgaaggtgtatatagtgaaccccgccccattggcaccagatacctgactcgtaatctgtaa

SEQ ID NO: 354 - protein, 737 aa, Artificial Sequence
  Synthetic polypeptide
MAADGYLPDWLEDNLSEGIREWWALKPGAPQPKANQQHQDNARGLVLPGYKYLGPGNGLDKGEPVNAADAAALEHDKAYDQQLQAGDNPYLRYNHADAEFQERLQEDTSFGGNLGRAVFQAKKRILEPLGLVEEAAKTAPGKKRPVDQSPQEPDSSSGVGKSGKQPARKRLNFGQTGDSESVPDPQPLGEPPAAPTSLGSNTMASGGGAPMADNNEGADGVGSSSGNWHCDSQWLGDRVITTSTRTWALPTYNNHLYKQISNGTSGGATNDNTYFGYSTPWGYFDFNRFHCHFSPRDWQRLINNNWGFRPKRLSFKLFNIQVKEVTQNEGTKTIANNLTSTIQVFTDSEYQLPYVLGSAHQGCLPPFPADVFMVPQYGYLTLNNGSQAVGRSSFYCLEYFPSQMLRTGNNFTFSYTFEEVPFHSSYAHSQSLDRLMNPLIDQYLYYLSRTQTTGGTANTQTLGFSQGGPNTMANQAKNWLPGPCYRQQRVSTTTGQNNNSNFAWTAGTKYHLNGRNSLANPGIAMATHKDDEERFFPSNGILIFGKQNAARDNADYSDVMLTSEEEIKTTNPVATEEYGIVADNLQQQNTAPQIGTVNSQGDLPGMVWQNRDVYLQGPIWAKIPHTDGNFHPSPLMGGFGLKHPPPQILIKNTPVPADPPTTFNQSKLNSFITQYSTGQVSVEIEWELQKENSKRWNPEIQYTSNYYKSNNVEFAVNTEGVYSEPRPIGTRYLTRNL

SEQ ID NO: 355 - DNA, 2205 bp, Artificial Sequence
  Synthetic polynucleotide
atggctgctgacggttatcttccagattggctcgaggacaacctttctgaaggcattcgtgagtggtgggctctgaaacctggagtccctcaacccaaagcgaaccaacaacaccaggacaactgtcggggtcttgtgcttccgggttacaaatacctcggacccggtaacggactcgacaaaggagagccggtcaacgaggcggacgcggcagccctcgaacacgacaaggcctacgaccagcagctcaaggccggagacaacccgtacctcaagtacaaccacgccgacgccgagttccaggagcggctcaaagaagatacgtcttttgggggcaacctcgggcgagcagtcttccagaccaaaaagaggcttcttgaacctcttggtctggttgaggaagcggctaagacggctcctggaaagaagaggcctgtagagcagtctcctcaggaaccggactcctccgcgggtattggcaaatcgggtgcacagcccgctaaaaagagactcaatttcggtcagactggcgacacagagtcagtcccagaccctcaaccaatcggagaacctcccgcagccccctcaggtgtgggatctcttacaatggcttcaggtggtggcgcaccagtggcagacaataacgaaggtgccgatggagtgggtagttcctcgggaaattggcattgcgattcccaatggctgggggacagagtcatcaccaccagcacccgaacctgggccctgcccacctacaacaaccacctctacaaacaaatttccagccaatcaggagcctcgaacgacaatcactactttggctacagcaccccttgggggtattttgacttcaacagattccactgccacttttcaccacgtgactggcagcgactcatcaacaacaactggggattccggcccaagagactcagcttcaagctcttcaacatccaggtcaaagaggttacggacaacaatggagtcaagaccatcgccaataaccttaccagcacggtccaggtcttcacggactcagactatcagctcccgtacgtgctcgggtcggctcacgagggctgcctcccgccgttcccagcggacgttttcatgattcctcagtacgggtatctgacgcttaatgatggaagccaggccgtgggtcgttcgtccttttactgcctggaatatttcccgtcgcaaatgctaagaacgggtaacaacttccagttcagctacgagtttgagaacgtacctttccatagcagctacgctcacagccaaagcctggaccgactaatgaatccactcatcgaccaatacttgtactatctctcaaagactattaacggttctggacagaatcaacaaacgctaaaattcagtgtggccggacccagcaacatggctgtccagggaagaaactacatacctggacccagctaccgacaacaacgtgtctcaaccactgtgactcaaaacaacaacagcgaatttgcttggcctggagcttcttcttgggctctcaatggacgtaatagcttgatgaatcctggacctgctatggccagccacaaagaaggagaggaccgtttctttcctttgtctggatctttaatttttggcaaacaaggaactggaagagacaacgtggatgcggacaaagtcatgataaccaacgaagaagaaattaaaactactaacccggtagcaacggagtcctatggacaagtggccacaaaccaccagagtgcccaagcacaggcgcagaccggctgggttcaaaaccaaggaatacttccgggtatggtttggcaggacagagatgtgtacctgcaaggacccatctgggccaagattcctcacacggacggcaacttccacccgtctccgctgatgggcggctttggcctgaaacatcctccgcctcagatcctgatcaagaacacgcctgttcctgcgaatcctccggcggagttttcagctacaaagtttgcttcattcatcacccagtactccacaggacaagtgagtgtggaaattgaatgggagctgcagaaagaaaacagcaagcgctggaatcccgaagtgcagtacacatccaattatgcaaaatctgccaacgttgattttactgtggacaacaatggactttatactgagcctcgccccattggcacccgttaccttaccaaacctctgtaa

SEQ ID NO: 356 - protein, 734 aa, Artificial Sequence
  Synthetic polypeptide
MAADGYLPDWLEDNLSEGIREWWALKPGVPQPKANQQHQDNCRGLVLPGYKYLGPGNGLDKGEPVNEADAAALEHDKAYDQQLKAGDNPYLKYNHADAEFQERLKEDTSFGGNLGRAVFQTKKRLLEPLGLVEEAAKTAPGKKRPVEQSPQEPDSSAGIGKSGAQPAKKRLNFGQTGDTESVPDPQPIGEPPAAPSGVGSLTMASGGGAPVADNNEGADGVGSSSGNWHCDSQWLGDRVITTSTRTWALPTYNNHLYKQISSQSGASNDNHYFGYSTPWGYFDFNRFHCHFSPRDWQRLINNNWGFRPKRLSFKLFNIQVKEVTDNNGVKTIANNLTSTVQVFTDSDYQLPYVLGSAHEGCLPPFPADVFMIPQYGYLTLNDGSQAVGRSSFYCLEYFPSQMLRTGNNFQFSYEFENVPFHSSYAHSQSLDRLMNPLIDQYLYYLSKTINGSGQNQQTLKFSVAGPSNMAVQGRNYIPGPSYRQQRVSTTVTQNNNSEFAWPGASSWALNGRNSLMNPGPAMASHKEGEDRFFPLSGSLIFGKQGTGRDNVDADKVMITNEEEIKTTNPVATESYGQVATNHQSAQAQAQTGWVQNQGILPGMVWQDRDVYLQGPIWAKIPHTDGNFHPSPLMGGFGLKHPPPQILIKNTPVPANPPAEFSATKFASFITQYSTGQVSVEIEWELQKENSKRWNPEVQYTSNYAKSANVDFTVDNNGLYTEPRPIGTRYLTKPL

SEQ ID NO: 357 - DNA, 2211 bp, Artificial Sequence
  Synthetic polynucleotide
atggctgccgatggttatcttccagattggctcgaggacaacctctctgagggcattcgcgagtggtgggacttgaaacctggagcccctaaacccaaggcaaatcaacaacatcaggacaacgctcgaggtcttgtgcttccgggttacaaataccttggacccggcaacggactcgacaagggggagccggtcaacgcagcagacgcggcggccctcgagcacgacaaggcctacgaccagcagctcaaggccggagacaacccgtacctcaagtacaaccacgccgacgccgagttccaggagcggctcaaagaagatacgtcttttgggggcaacctcgggcgagcagtcttccaggccaaaaagaggcttcttgaacctcttggtctggttgaggaagcggctaagacggctcctggaaagaagagaccggtagagccatcaccccagcgttctccagactcctctacgggcatcggcaagaaaggccaacagcccgctaaaaagagactcaattttggtcagactggcgactcagagtcagtccccgacccacaacctctcggagaacctccagcaacccccgctgctgtgggacctactacaatggcttcaggcggtggcgcaccaatggcagacaataacgagggtgccgatggagtgggtaattcctcaggaaattggcattgcgattcccaatggctgggcgacagagtcatcaccaccagcaccagaacctgggccctgcccacttacaacaaccatctctacaagcaaatctccagccaatcaggagcttcaaacgacaaccactactttggctacagcaccccttgggggtattttgactttaacagattccactgccacttttcaccacgtgactggcaaagactcatcaacaacaactggggattccgacccaagagactcaacttcaagctcttcaacatccaagtcaaggaggtcacgacgaatgatggcgtcacgaccatcgctaataaccttaccagcacggttcaagtcttctcggactcggagtaccagttgccgtacgtcctcggctctgcgcaccagggctgcctccctccgttcccggcggacgtgttcatgattccgcagtacggctacctaacgctcaacaatggcagccaagccgtgggacgttcatccttttactgcctggaatatttcccttctcagatgctgagaacgggcaacaactttaccttcagctacacttttgaggacgttcctttccacagcagctacgctcacagccagagtctggaccgtctcatgaatcctctcatcgaccagtacctgtattacttgagcagaacaaacactccaagtggaaccaccacgcagtcaaggcttcagttttctcaggccggagcgagtgacattcgggaccagtctaggaactggcttcctggaccctgttaccgccagcagcgcgtttctaaaacaaaaacagacaacaacaacagcaattttacctggactggtgcttcaaaatataaccttaatgggcgtgaatctataatcaaccctggcactgctatggcctcacacaaagacgacgaagacaagttctttcccatgagcggtgtcatgatttttggaaaagagagcgccggagcttcaaacactgcattggacaatgtcatgatcacagacgaagaggaaatcaaagccactaaccccgtggccaccgaaagatttgggactgtggcagtcaatctccagagcagcagcacagaccctgcgaccggagatgtgcatgttatgggagcattacctggcatggtgtggcaagatagagacgtgtacctgcagggtcccatttgggccaaaattcctcacacagatggacactttcacccgtctcctcttatgggcggctttggactcaagaacccgcctcctcagatcctcatcaaaaacacgcctgttcctgcgaatcctccggcggagttttcagctacaaagtttgcttcattcatcacccaatactccacaggacaagtgagtgtggaaattgaatgggagctgcagaaagaaaacagcaagcgctggaatcccgaagtgcagtacacatccaattatgcaaaatctgccaacgttgattttactgtggacaacaatggactttatactgagcctcgccccattggcacccgttaccttacccgtcccctgtaa

SEQ ID NO: 358 - protein, 736 aa, Artificial Sequence
  Synthetic polypeptide
MAADGYLPDWLEDNLSEGIREWWDLKPGAPKPKANQQHQDNARGLVLPGYKYLGPGNGLDKGEPVNAADAAALEHDKAYDQQLKAGDNPYLKYNHADAEFQERLKEDTSFGGNLGRAVFQAKKRLLEPLGLVEEAAKTAPGKKRPVEPSPQRSPDSSTGIGKKGQQPAKKRLNFGQTGDSESVPDPQPLGEPPATPAAVGPTTMASGGGAPMADNNEGADGVGNSSGNWHCDSQWLGDRVITTSTRTWALPTYNNHLYKQISSQSGASNDNHYFGYSTPWGYFDFNRFHCHFSPRDWQRLINNNWGFRPKRLNFKLFNIQVKEVTTNDGVTTIANNLTSTVQVFSDSEYQLPYVLGSAHQGCLPPFPADVFMIPQYGYLTLNNGSQAVGRSSFYCLEYFPSQMLRTGNNFTFSYTFEDVPFHSSYAHSQSLDRLMNPLIDQYLYYLSRTNTPSGTTTQSRLQFSQAGASDIRDQSRNWLPGPCYRQQRVSKTKTDNNNSNFTWTGASKYNLNGRESIINPGTAMASHKDDEDKFFPMSGVMIFGKESAGASNTALDNVMITDEEEIKATNPVATERFGTVAVNLQSSSTDPATGDVHVMGALPGMVWQDRDVYLQGPIWAKIPHTDGHFHPSPLMGGFGLKNPPPQILIKNTPVPANPPAEFSATKFASFITQYSTGQVSVEIEWELQKENSKRWNPEVQYTSNYAKSANVDFTVDNNGLYTEPRPIGTRYLTRPL

SEQ ID NO: 359 - DNA, 2214 bp, Artificial Sequence; identical to SEQ ID NO: 331
  Synthetic polynucleotide

SEQ ID NO: 360 - protein, 737 aa, Artificial Sequence; identical to SEQ ID NO: 332
  Synthetic polypeptide

SEQ ID NO: 361 - DNA, 2205 bp, Artificial Sequence
  Synthetic polynucleotide
atggctgctgacggttatcttccagattggctcgaggacaacctttctgaaggcattcgtgagtggtgggctctgaaacctggagtccctcaacccaaagcgaaccaacaacaccaggacaaccgtcggggtcttgtgcttccgggttacaaatacctcggacccggtaacggactcgacaaaggagagccggtcaacgaggcggacgcggcagccctcgaacacgacaaggcctacgaccagcagctcaaggccggagacaacccgtacctcaagtacaaccacgccgacgccgagttccaggagcggctcaaagaagatacgtcttttgggggcaacctcgggcgagcagtcttccaggccaaaaagaggcttcttgaacctcttggtctggttgaggaagcggctaagacggctcctggaaagaagaggcctgtagagcagtctcctcaggaaccggactcctccgcgggtattggcaaatcgggtgcacagcccgctaaaaagagactcaatttcggtcagactggcgacacagagtcagtcccagaccctcaaccaatcggagaacctcccgcagccccctcaggtgtgggatctcttacaatggcttcaggtggtggcgcaccagtggcagacaataacgaaggtgccgatggagtgggtagttcctcgggaaattggcattgcgattcccaatggctgggggacagagtcatcaccaccagcacccgaacctgggccctgcccacctacaacaaccacctctacaaacaaatttccagccaatcaggagcctcgaacgacaatcactactttggctacagcaccccttgggggtattttgacttcaacagattccactgccacttttcaccacgtgactggcagcgactcatcaacaacaactggggattccggcccaagagactcagcttcaagctcttcaacatccaggtcaaagaggttacggacaacaatggagtcaagaccatcgccaataaccttaccagcacggtccaggtcttcacggactcagactatcagctcccgtacgtgctcgggtcggctcacgagggctgcctcccgccgttcccagcggacgttttcatgattcctcagtacgggtatctgacgcttaatgatggaagccaggccgtgggtcgttcgtccttttactgcctggaatatttcccgtcgcaaatgctaagaacgggtaacaacttccagttcagctacgagtttgagaacgtacctttccatagcagctacgctcacagccaaagcctggaccgactaatgaatccactcatcgaccaatacttgtactatctctcaaagactattaacggttctggacagaatcaacaaacgctaaaattcagtgtggccggacccagcaacatggctgtccagggaagaaactacatacctggacccagctaccgacaacaacgtgtctcaaccactgtgactcaaaacaacaacagcgaatttgcttggcctggagcttcttcttgggctctcaatggacgtaatagcttgatgaatcctggacctgctatggccagccacaaagaaggagaggaccgtttctttcctttgtctggatctttaatttttggcaaacaaggaactggaagagacaacgtggatgcggacaaagtcatgataaccaacgaagaagaaattaaaactactaacccggtagcaacggagtcctatggacaagtggccacaaaccaccagagtgcccaagcacaggcgcagaccggctgggttcaaaaccaaggaatacttccgggtatggtttggcaggacagagatgtgtacctgcaaggacccatttgggccaaaattcctcacacggacggcaactttcacccttctccgctgatgggagggtttggaatgaaacacccgcctcctcagatcctcatcaaaaacacacctgtacctgcggatcctccaacggccttcaacaaggacaagctgaactctttcatcacccagtattctactggccaagtcagcgtggagatcgagtgggagctgcagaaggaaaacagcaagcgctggaaccccgagatccagtacacctccaactactacaaatctacaagtgtggactttgctgttaatacagaaggcgtgtactctgaaccccgccccattggcacccgttacctcacccgtaatctgtaa

SEQ ID NO: 362 - protein, 734 aa, Artificial Sequence
  Synthetic polypeptide
MAADGYLPDWLEDNLSEGIREWWALKPGVPQPKANQQHQDNRRGLVLPGYKYLGPGNGLDKGEPVNEADAAALEHDKAYDQQLKAGDNPYLKYNHADAEFQERLKEDTSFGGNLGRAVFQAKKRLLEPLGLVEEAAKTAPGKKRPVEQSPQEPDSSAGIGKSGAQPAKKRLNFGQTGDTESVPDPQPIGEPPAAPSGVGSLTMASGGGAPVADNNEGADGVGSSSGNWHCDSQWLGDRVITTSTRTWALPTYNNHLYKQISSQSGASNDNHYFGYSTPWGYFDFNRFHCHFSPRDWQRLINNNWGFRPKRLSFKLFNIQVKEVTDNNGVKTIANNLTSTVQVFTDSDYQLPYVLGSAHEGCLPPFPADVFMIPQYGYLTLNDGSQAVGRSSFYCLEYFPSQMLRTGNNFQFSYEFENVPFHSSYAHSQSLDRLMNPLIDQYLYYLSKTINGSGQNQQTLKFSVAGPSNMAVQGRNYIPGPSYRQQRVSTTVTQNNNSEFAWPGASSWALNGRNSLMNPGPAMASHKEGEDRFFPLSGSLIFGKQGTGRDNVDADKVMITNEEEIKTTNPVATESYGQVATNHQSAQAQAQTGWVQNQGILPGMVWQDRDVYLQGPIWAKIPHTDGNFHPSPLMGGFGMKHPPPQILIKNTPVPADPPTAFNKDKLNSFITQYSTGQVSVEIEWELQKENSKRWNPEIQYTSNYYKSTSVDFAVNTEGVYSEPRPIGTRYLTRNL

SEQ ID NO: 363 - DNA, 2217 bp, Artificial Sequence
  Synthetic polynucleotide
atggctgccgatggttatcttccagattggctcgaggacaacctctctgagggcattcgcgagtggtgggcgctgaaacctggagccccgaagcccaaagccaaccagcaaaagcaggacgacggccggggtctggtgcttcctggctacaagtacctcggacccttcaacggactcgacaagggggagcccgtcaacgcggcggacgcagcggccctcgagcacgacaaggcctacgaccagcagctgcaggcgggtgacaatccgtacctgcggtataaccacgccgacgccgagtttcaggagcgtctgcaagaagatacgtcttttgggggcaacctcgggcgagcagtcttccaggccaagaagcgggttctcgaacctctcggtctggttgaggaaggcgctaagacggctcctggaaagaagagaccggtagagccatcaccccagcgttctccagactcctctacgggcatcggcaagaaaggccaacagcccgccagaaaaagactcaattttggtcagactggcgactcagagtcagttccagaccctcaacctctcggagaacctccagcagcgccctctggtgtgggacctaatacaatggctgcaggcggtggcgcaccaatggcagacaataacgaaggcgccgacggagtgggtagttcctcgggaaattggcattgcgattccacatggctgggcgacagagtcatcaccaccagcacccgaacctgggccctgcccacctacaacaaccacctctacaagcaaatctccaacgggacatcgggaggagccaccaacgacaacacctacttcggctacagcaccccctgggggtattttgactttaacagattccactgccacttttcaccacgtgactggcagcgactcatcaacaacaactggggattccggcccaagagactcagcttcaagctcttcaacatccaggtcaaggaggtcacgcagaatgaaggcaccaagaccatcgccaataacctcaccagcaccatccaggtgtttacggactcggagtaccagctgccgtacgttctcggctctgcccaccagggctgcctgcctccgttcccggcggacgtgttcatgattccccagtacggctacctaacactcaacaacggtagtcaggccgtgggacgctcctccttctactgcctggaatactttccttcgcagatgctgagaaccggcaacaacttccagtttacttacaccttcgaggacgtgcctttccacagcagctacgcccacagccagagcttggaccggctgatgaatcctctgattgaccagtacctgtactacttgtctcggactcaaacaacaggaggcacggcaaatacgcagactctgggcttcagccaaggtgggcctaatacaatggccaatcaggcaaagaactggctgccaggaccctgttaccgccaacaacgcgtctcaacgacaaccgggcaaaacaacaatagcaactttgcctggactgctgggaccaaataccatctgaatggaagaaattcattggctaatcctggcatcgctatggcaacacacaaagacgacgaggagcgtttttttcccagtaacgggatcctgatttttggcaaacaaaatgctgccagagacaatgcggattacagcgatgtcatgctcaccagcgaggaagaaatcaaaaccactaaccctgtggctacagaggaatacggtatcgtggcagataacttgcagcagcaaaacacggctcctcaaattggaactgtcaacagccagggggccttacccggtatggtctggcagaaccgggacgtgtacctgcagggtcccatctgggccaagattcctcacacggacggcaacttccacccctctcccctcatgggtggattcggacttaaacatcctccgcctcagatcctgatcaagaacacgcctgtacctgcggatcctccgaccaccttcaaccagtcaaagctgaactctttcatcacgcaatacagcaccggacaggtcagcgtggaaattgaatgggagctgcagaaggaaaacagcaagcgctggaaccccgagatccagtacacctccaactactacaaatctacaagtgtggactttgctgttaatacagaaggcgtgtactctgaaccccgccccattggcacccgttacctcacccgtaatctgtaa

SEQ ID NO: 364 - protein, 738 aa, Artificial Sequence; identical to SEQ ID NO: 110
  Synthetic polypeptide

SEQ ID NO: 365 - DNA, 2211 bp, Artificial Sequence
  Synthetic polynucleotide
atggctgctgacggttatcttccagattggctcgaggacaacctttctgaaggcattcgagagtggtgggcgctgcaacctggagcccctaaacccaaggcaaatcaacaacatcaggacaacgctcggggtcttgtgcttccgggttacaaatacctcggacccggcaacggactcgacaagggggaacccgtcaacgcagcggacgcggcagccctcgagcacgacaaggcctacgaccagcagctcaaggccggtgacaacccctacctcaagtacaaccacgccgacgccgagttccaggagcggctcaaagaagatacgtcttttgggggcaacctcgggcgagcagtcttccaggccaaaaagaggcttcttgaacctcttggtctggttgaggaagcggctaagacggctcctggaaagaagaggcctgtagatcagtctcctcaggaaccggactcatcatctggtgttggcaaatcgggcaaacagcctgccagaaaaagactaaatttcggtcagactggcgactcagagtcagtcccagaccctcaacctctcggagaaccaccagcagcccccacaagtttgggatctaatacaatggcttcaggcggtggcgcaccaatggcagacaataacgagggtgccgatggagtgggtaattcctcaggaaattggcattgcgattcccaatggctgggcgacagagtcatcaccaccagcaccagaacctgggccctgcccacttacaacaaccatctctacaagcaaatctccagccaatcaggagcttcaaacgacaaccactactttggctacagcaccccttgggggtattttgactttaacagattccactgccacttctcaccacgtgactggcagcgactcattaacaacaactggggattccggcccaagaaactcagcttcaagctcttcaacatccaagttaaagaggtcacgcagaacgatggcacgacgactattgccaataaccttaccagcacggttcaggtgtttacggactcggagtatcagctcccgtacgtgctcgggtcggcgcaccaaggctgtctcccgccgtttccagcggacgtcttcatggtccctcagtatggatacctcaccctgaacaacggaagtcaagcggtgggacgctcatccttttactgcctggagtacttcccttcgcagatgctaaggactggaaataacttccaattcagctataccttcgaggatgtaccttttcacagcagctacgctcacagccagagtttggatcgcttgatgaatcctcttattgatcagtatctgtactacctgaacagaacgcaaggaacaacctctggaacaaccaaccaatcacggctgctttttagccaggctgggcctcagtctatgtctttgcaggccagaaattggctacctgggccctgctaccggcaacagagactttcaaagactgctaacgacaacaacaacagtaactttccttggacagcggccagcaaatatcatctcaatggccgcgactcgctggtgaatccaggaccagctatggccagtcacaaggacgatgaagaaaaatttttccctatgcacggcaatctaatatttggcaaagaagggacaacggcaagtaacgcagaattagataatgtaatgattacggatgaagaagagattcgtaccaccaatcctgtggcaacagagcagtatggaactgtggcaaataacttgcagagctcaaatacagctcccacgactagaactgtcaatgatcagggggccttacctggcatggtgtggcaagatcgtgacgtgtaccttcaaggacctatctgggcaaagattcctcacacggatggacactttcatccttctcctctgatgggaggctttggactgaaacatccgcctcctcaaatcatgatcaaaaatactccggtaccggcaaatcctccgacgactttcagcccggccaagtttgcttcatttatcactcagtactccactggacaggtcagcgtggaaattgagtgggagctacagaaagaaaacagcaaacgttggaatccagagattcagtacacttccaactacaacaagtctgttaatgtggactttactgtagacactaatggtgtttatagtgaacctcgccccattggcacccgttaccttacccgtcccctgtaa

SEQ ID NO: 366 - protein, 736 aa, Artificial Sequence; identical to SEQ ID NO: 336
  Synthetic polypeptide

SEQ ID NO: 367 - DNA, 2211 bp, Artificial Sequence; identical to SEQ ID NO: 335
  Synthetic polynucleotide

SEQ ID NO: 368 - protein, 736 aa, Artificial Sequence; identical to SEQ ID NO: 336
  Synthetic polypeptide

SEQ ID NO: 369 - DNA, 2211 bp, Artificial Sequence
  Synthetic polynucleotide
atggctgctgacggttatcttccagattggctcgaggacaacctttctgaaggcattcgtgagtggtgggctctgaaacctggagtccctcaacccaaagcgaaccaacaacaccaggacaaccgtcggggtcttgtgcttccgggttacaaatacctcggacccggtaacggactcgacaaaggagagcccgtcaacgcggcggatgcagcggccctcgagcacgacaaggcctacgaccagcagctcaaagcgggtgacaatccgtacctgcggtataaccacgccgacgccgagtttcaggagcgtctgcaagaagatacgtcttttgggggcaacctcgggcgagcagtcttccaggccaagaagagggttctcgaaccttttggtctggttgaggaaggtgctaagacggctcctggaaagaaacgtccggtagagcagtcgccacaagagccagactcctcctcgggcatcggcaagacaggccagcagcccgctaaaaagagactcaattttggtcagactggcgactcagagtcagtccccgacccacaacctctcggagaacctccagcaacccccgctgctgtgggacctactacaatggcttcaggcggtggcgcaccaatggcagacaataacgaaggcgccgacggagtgggtaatgcctcaggaaattggcattgcgattccacatggctgggcgacagagtcatcaccaccagcacccgcacctgggccttgcccacctacaataaccacctctacaagcaaatctccagtgcttcaacgggggccagcaacgacaaccactacttcggctacagcaccccctgggggtattttgatttcaacagattccactgccatttctcaccacgtgactggcagcgactcatcaacaacaattggggattccggcccaagagactcaacttcaagctcttcaacatccaagtcaaggaggtcacgacgaatgatggcgtcacgaccatcgctaataaccttaccagcacggttcaagtcttctcggactcggagtaccagcttccgtacgtcctcggctctgcgcaccagggctgcctccctccgttcccggcggacgtgttcatgattccgcaatacggctacctgacgctcaacaatggcagccaagccgtgggacgttcatccttttactgcctggaatatttcccttctcagatgctgagaacgggcaacaactttaccttcagctacacctttgaggaagtgcctttccacagcagctacgcgcacagccagagcctggaccggctgatgaatcctctcatcgaccaatacctgtattacctgaacagaactcaaaatcagtccggaagtgcccaaaacaaggacttgctgtttagccgtgggtctccagctggcatgtctgttcagcccaaaaactggctacctggaccctgttatcggcagcagcgcgtttctaaaacaaaaacagacaacaacaacagcaattttacctggactggtgcttcaaaatataacctcaatgggcgtgaatccatcatcaaccctggcactgctatggcctcacacaaagacgacgaagacaagttctttcccatgagcggtgtcatgatttttggaaaagagagcgccggagcttcaaacactgcattggacaatgtcatgattacagacgaagaggaaattaaagccactaaccctgtggccaccgaaagatttgggaccgtggcagtcaatttccagagcagcagcacagaccctgcgaccggagatgtgcatgttatgggagccttacctggaatggtgtggcaagacagagacgtatacctgcagggtcctatttgggccaaaattcctcacacggatggacactttcacccgtctcctctcatgggcggctttggacttaagcacccgcctcctcagatcctcatcaaaaacacgcctgttcctgcgaatcctccggcagagttttcggctacaaagtttgcttcattcatcacccagtattccacaggacaagtgagcgtggagattgaatgggagctgcagaaagaaaacagcaaacgctggaatcccgaagtgcagtatacatctaactatgcaaaatctgccaacgttgatttcactgtggacaacaatggactttatactgagcctcgccccattggcacccgttacctcacccgtcccctgtaa

SEQ ID NO: 370 - protein, 736 aa, Artificial Sequence
  Synthetic polypeptide
MAADGYLPDWLEDNLSEGIREWWALKPGVPQPKANQQHQDNRRGLVLPGYKYLGPGNGLDKGEPVNAADAAALEHDKAYDQQLKAGDNPYLRYNHADAEFQERLQEDTSFGGNLGRAVFQAKKRVLEPFGLVEEGAKTAPGKKRPVEQSPQEPDSSSGIGKTGQQPAKKRLNFGQTGDSESVPDPQPLGEPPATPAAVGPTTMASGGGAPMADNNEGADGVGNASGNWHCDSTWLGDRVITTSTRTWALPTYNNHLYKQISSASTGASNDNHYFGYSTPWGYFDFNRFHCHFSPRDWQRLINNNWGFRPKRLNFKLFNIQVKEVTTNDGVTTIANNLTSTVQVFSDSEYQLPYVLGSAHQGCLPPFPADVFMIPQYGYLTLNNGSQAVGRSSFYCLEYFPSQMLRTGNNFTFSYTFEEVPFHSSYAHSQSLDRLMNPLIDQYLYYLNRTQNQSGSAQNKDLLFSRGSPAGMSVQPKNWLPGPCYRQQRVSKTKTDNNNSNFTWTGASKYNLNGRESIINPGTAMASHKDDEDKFFPMSGVMIFGKESAGASNTALDNVMITDEEEIKATNPVATERFGTVAVNFQSSSTDPATGDVHVMGALPGMVWQDRDVYLQGPIWAKIPHTDGHFHPSPLMGGFGLKHPPPQILIKNTPVPANPPAEFSATKFASFITQYSTGQVSVEIEWELQKENSKRWNPEVQYTSNYAKSANVDFTVDNNGLYTEPRPIGTRYLTRPL

SEQ ID NO: 371 - DNA, 2217 bp, Artificial Sequence
  Synthetic polynucleotide
atggctgccgatggttatcttccagattggctcgaggacaacctctctgagggcattcgcgagtggtgggacttgaaacctggagccccgaaacccaaagccaaccagcaaaagcaggacgacggccggggtctggtgcttcctggctacaagtacctcggacccttcaacggactcgacaagggggagcccgtcaacgcggcggatgcaacggccctcgagcacgacaaggcctacgaccagcagctgcaggcgggtgacaatccgtacctgcggtataaccacgccgacgccgagtttcaggagcgtctgcaagaagatacgtcttttgggggcaacctcgggcgagcagtcttccaggccaagaagcgggttctcgaacctctcggtctggttgaggaaggcgctaagacggctcctggaaagaagagaccggtagagccatcaccccagcgttctccagactcctctacgggcatcggcaagaaaggccaacagcccgccagaaaaagactcaattttggtcagactggcgactcagagtcagttccagaccctcaacctctcggagaaccaccagcagcccccacaagtttgggatctaatacaatggcttcaggcggtggcgcaccaatggcagacaataacgagggtgccgatggagtgggtaattcctcaggaaattggcattgcgattcccaatggctgggcgacagagtcatcaccaccagcacccgcacctgggccttgcccacctacaataaccacctctacaagcaaatctccagtgcttcaacgggggccagcaacgacaaccactacttcggctacagcaccccctgggggtattttgactttaaccgcttccactgccacttctcgccaagagactggcaaagactcatcaacaacaattggggattccggcccaagagactcaacttcaaactcttcaacatccaagtcaaggaggtcacgacgaatgatggcgtcacgaccatcgccaataacctcaccagcaccatccaggtgtttacggactcggagtaccagctgccgtacgttctcggctctgcccaccagggctgcctgcctccgttcccggcggacgtgttcatgattccccagtatggatacctcaccctgaacaacggaagtcaagcggtgggacgctcatccttttactgcctggagtacttcccttcgcagatgctaaggactggaaataacttccaattcagctataccttcgaggatgtaccttttcacagcagctacgctcacagccagagtttggatcgcttgatgaatcctcttattgatcagtatctgtactacctgaacagaacgcaaggaacaacctctggaacaaccaaccaatcacggctgctttttagccaggctgggcctcagtctatgtctttgcaggccagaaattggctacctgggccctgctaccggcaacagagactttcaaagactgctaacgacaacaacaacagtaactttccttggacagcagccagcaaatatcatctcaatggccgcgactcgctggtgaatccaggaccagctatggccagtcacaaggacgatgaagaaaaatttttccctatgcacggcaatctaatatttggcaaagaagggacaacggcaagtaacgcagaattagataatgtaatgattacggatgaagaagagattcgtaccaccaatcctgtggcaacagagcagtatggaactgtggcaaataacttgcagagctcaaatacagctcccacgactagaactgtcaatgatcagggggccttacctggcatggtgtggcaagatcgtgacgtgtaccttcaggggcccatctgggcaaagattccacacacggacggacattttcacccctctcccctcatgggtggattcggacttaaacaccctcctccgcagattctcatcaagaacaccccggtacctgcgaatccttcgaccaccttcagtgcggcaaagtttgcttccttcatcacacagtactccacgggacaggtcagcgtggagatcgagtgggagctgcagaaggaaaacagcaagcgctggaacccggagatccagtacacttccaactattacaagtctaataatgttgaatttgctgttaatactgaaggtgtatatagtgaaccccgccccattggcaccagatacctgactcgtaatctgtaa

SEQ ID NO: 372 - protein, 738 aa, Artificial Sequence
  Synthetic polypeptide
MAADGYLPDWLEDNLSEGIREWWDLKPGAPKPKANQQKQDDGRGLVLPGYKYLGPFNGLDKGEPVNAADATALEHDKAYDQQLQAGDNPYLRYNHADAEFQERLQEDTSFGGNLGRAVFQAKKRVLEPLGLVEEGAKTAPGKKRPVEPSPQRSPDSSTGIGKKGQQPARKRLNFGQTGDSESVPDPQPLGEPPAAPTSLGSNTMASGGGAPMADNNEGADGVGNSSGNWHCDSQWLGDRVITTSTRTWALPTYNNHLYKQISSASTGASNDNHYFGYSTPWGYFDFNRFHCHFSPRDWQRLINNNWGFRPKRLNFKLFNIQVKEVTTNDGVTTIANNLTSTIQVFTDSEYQLPYVLGSAHQGCLPPFPADVFMIPQYGYLTLNNGSQAVGRSSFYCLEYFPSQMLRTGNNFQFSYTFEDVPFHSSYAHSQSLDRLMNPLIDQYLYYLNRTQGTTSGTTNQSRLLFSQAGPQSMSLQARNWLPGPCYRQQRLSKTANDNNNSNFPWTAASKYHLNGRDSLVNPGPAMASHKDDEEKFFPMHGNLIFGKEGTTASNAELDNVMITDEEEIRTTNPVATEQYGTVANNLQSSNTAPTTRTVNDQGALPGMVWQDRDVYLQGPIWAKIPHTDGHFHPSPLMGGFGLKHPPPQILIKNTPVPANPSTTFSAAKFASFITQYSTGQVSVEIEWELQKENSKRWNPEIQYTSNYYKSNNVEFAVNTEGVYSEPRPIGTRYLTRNL

SEQ ID NO: 373 - DNA, 2208 bp, Artificial Sequence
  Synthetic polynucleotide
atggctgccgatggttatcttccagattggctcgaggacaaccttagtgaaggaattcgcgagtggtgggacttgaaacctggagccccgaagcccaaagccaaccagcaaaagcaggacgacggccggggtctggtgcttcctggctacaagtacctcggacccttcaacggactcgacaagggggagcccgtcaacgcggcggacgcagcggccctcgagcacgacaaggcctacgaccagcagctcaaagcgggtgacaatccgtacctgcggtataaccacgccgacgccgagtttcaggagcgtctgcaagaagatacgtcttttgggggcaacctcgggcgagcagtcttccaggccaagaagcgggttctcgaacctctcggtctggttgaggaaggtgctaagacggctcctggaaagaaacgtccggtagagcagtcgccacaagagccagactcctcctcgggcattggcaagacaggccagcagcccgctaaaaagagactcaattttggtcagactggcgactcagagtcagtccccgacccacaacctctcggagaacctccagcaacccccgctgctgtgggacctactacaatggcttcaggcggtggcgcaccaatggcagacaataacgaaggcgccgacggagtgggtaatgcctcaggaaattggcattgcgattccacatggctgggcgacagagtcatcaccaccagcacccgaacctgggccctgcccacctacaacaaccacctctacaaacaaatttccagccaatcaggagcctcgaacgacaatcactactttggctacagcaccccttgggggtattttgatttcaacagattccactgccacttttcaccacgtgactggcagcgactcatcaacaacaattggggattccggcccaagagactcagcttcaagctcttcaacatccaggtcaaggaggtcacgcagaatgaaggcaccaagaccatcgccaataaccttaccagcacggttcaagtgtttacggactcggagtatcagctcccgtacgtgctcggctcggcgcatcaaggatgcctcccgccgttcccagcagacgtcttcatggtgccacagtatggatacctcaccctgaacaacgggagtcaggcagtaggacgctcttcattttactgcctggagtactttccttctcagatgctgcgtaccggaaacaactttaccttcagctacacttttgaggacgttcctttccacagcagctacgctcacagccagagtctggaccgtctcatgaatcctctgattgaccagtacctgtattacttgagcagaacaaacactccaagtggaaccaccacgcagtcaaggcttcagttttctcaggccggagcgagtgacattcgggaccagtctaggaactggcttcctggaccctgttaccgccagcagcgagtatcaaagacatctgcggataacaacaacagtgaatactcgtggactggagctaccaagtaccacctcaatggcagagactctctggtgaatccgggcccggccatggcaagccacaaggactatgaagaaaagttttttcctcagagcggggttctcatctttgggaagcaaggctcagagaaaacaaatgtggacattgaaaaggtcatgattacagacgaagaggaaatcaggacaaccaatcccgtggctacggagcagtatggttctgtatctaccaacctccagagaggcaacagacaagcagctaccgcagatgtcaacacacaaggcgttcttccaggcatggtctggcaggacagagatgtgtaccttcaggggcccatctgggcaaagattccacacacggacggacattttcacccgtctccgctgatgggcggctttggcctgaaacatcctccgcctcagatcctgatcaagaacacgcctgtacctgcggatcctccgaccaccttcaaccagtcaaagctgaactctttcatcactcagtattctactggccaagtcagcgtggagatcgagtgggagctgcagaaggaaaacagcaagcgctggaaccccgagatccagtacacctccaactactacaaatctacaagtgtggactttgctgttaatacagaaggcgtgtactctgaaccccgccccattggcacccgttacctcacccgtaatctgtaa

SEQ ID NO: 374 - protein, 735 aa, Artificial Sequence
  Synthetic polypeptide
MAADGYLPDWLEDNLSEGIREWWDLKPGAPKPKANQQKQDDGRGLVLPGYKYLGPFNGLDKGEPVNAADAAALEHDKAYDQQLKAGDNPYLRYNHADAEFQERLQEDTSFGGNLGRAVFQAKKRVLEPLGLVEEGAKTAPGKKRPVEQSPQEPDSSSGIGKTGQQPAKKRLNFGQTGDSESVPDPQPLGEPPATPAAVGPTTMASGGGAPMADNNEGADGVGNASGNWHCDSTWLGDRVITTSTRTWALPTYNNHLYKQISSQSGASNDNHYFGYSTPWGYFDFNRFHCHFSPRDWQRLINNNWGFRPKRLSFKLFNIQVKEVTQNEGTKTIANNLTSTVQVFTDSEYQLPYVLGSAHQGCLPPFPADVFMVPQYGYLTLNNGSQAVGRSSFYCLEYFPSQMLRTGNNFTFSYTFEDVPFHSSYAHSQSLDRLMNPLIDQYLYYLSRTNTPSGTTTQSRLQFSQAGASDIRDQSRNWLPGPCYRQQRVSKTSADNNNSEYSWTGATKYHLNGRDSLVNPGPAMASHKDYEEKFFPQSGVLIFGKQGSEKTNVDIEKVMITDEEEIRTTNPVATEQYGSVSTNLQRGNRQAATADVNTQGVLPGMVWQDRDVYLQGPIWAKIPHTDGHFHPSPLMGGFGLKHPPPQILIKNTPVPADPPTTFNQSKLNSFITQYSTGQVSVEIEWELQKENSKRWNPEIQYTSNYYKSTSVDFAVNTEGVYSEPRPIGTRYLTRNL

SEQ ID NO: 375 - DNA, 2214 bp, Artificial Sequence
  Synthetic polynucleotide
atggctgccgatggttatcttccagattggctcgaggacaacctctctgagggcattcgcgagtggtgggacttgaaacctggagccccgaaacccaaagccaaccagcaaaagcaggacgacggccggggtctggtgcttcctggctacaagtacctcggacccttcaacggactcgacaagggggagcccgtcaacgcggcggatgcagcggccctcgagcacgacaaggcctacgaccagcagctcaaagcgggtgacaatccgtacctgcggtataaccacgccgacgccgagtttcaggagcgtctgcaagaagatacgtcttttgggggcaacctcgggcgagcagtcttccaggccaagaagagggttctcgaaccttttggtctggttgaggaaggtgctaagacggctcctggaaagaaacgtccggtagagcagtcgccacaagagccagactcctcctcgggcattggcaagacaggccagcagcctgcaagaaaaagattgaattttggtcagactggagacgcagactcagtacctgacccccagcctctcggacagccaccagcagccccctctggtctgggaactaatacgatggctacaggcagtggcgcaccaatggcagacaataacgagggcgccgacggagtgggtaattcctcgggaaattggcattgcgattcccaatggctgggggacagagtcatcaccaccagcacccgaacctgggccctgcccacctacaacaatcacctctacaagcaaatctccaacagcacatctggaggatcttcaaatgacaacgcctacttcggctacagcaccccctgggggtattttgatttcaacagattccactgccatttctcaccacgtgactggcagcgactcatcaacaacaattggggattccggcccaagagactcaacttcaagctcttcaacatccaggtcaaggaggtcacgcagaatgaaggcaccaagaccatcgccaataacctcaccagcaccatccaggtgtttacggactcggagtaccagctgccgtacgttctcggctctgcccaccagggctgcctgcctccgttcccggcggacgtgttcatgattccccagtacggctacctaacactcaacaacggtagtcaggccgtgggacgctcctccttctactgcctggaatactttccttcgcagatgctgagaaccggcaacaacttccagtttacttacaccttcgaggacgtgcctttccacagcagctacgcccacagccagagcttggaccggctgatgaatcctctgattgaccagtacctgtactacttgtctcggactcaaacaacaggaggcacgacaaatacgcagactctgggcttcagccaaggtgggcctaatacaatggccaatcaggcaaagaactggctgccaggaccctgttaccgccagcagcgagtatcaaagacatttgcggataacaacaacagtgaatactcgtggactggagctaccaagtaccacctcaatggcagagactctctggtgaatccgggcccggccatggcaagccacaaggacgatgaagaaaagttttttcctcagagcggggttctcatctttgggaagcaaggctcagagaaaacaaatgtggacattgaaaaggtcatgattacagacgaagaggaaatcaggacaaccaatcccgtggctacggagcagtatggttctgtatctaccaacctccagagaggcaacagacaagcagctaccgcagatgtcaacacacaaggcgttcttccaggcatggtctggcaggacagagatgtgtaccttcaggggcccatctgggcaaagattccacacacggacggacattttcacccctctcccctcatgggtggattcggacttaaacaccctccgcctcagatcctgatcaagaacacgcctgtacccgcggatcctccgaccaccttcaaccagtcaaagctgaactctttcatcacccagtattctactggccaagtcagcgtggagatcgagtgggagctgcagaaggaaaacagcaagcgctggaaccccgagatccagtacacctccaactactacaaatctacaagtgtggactttgctgttaatacagaaggcgtgtactctgaaccccgccccattggcacccgttacctcacccgtaatctgtaa

SEQ ID NO: 376 - protein, 737 aa, Artificial Sequence
  Synthetic polypeptide
MAADGYLPDWLEDNLSEGIREWWDLKPGAPKPKANQQKQDDGRGLVLPGYKYLGPFNGLDKGEPVNAADAAALEHDKAYDQQLKAGDNPYLRYNHADAEFQERLQEDTSFGGNLGRAVFQAKKRVLEPFGLVEEGAKTAPGKKRPVEQSPQEPDSSSGIGKTGQQPARKRLNFGQTGDADSVPDPQPLGQPPAAPSGLGTNTMATGSGAPMADNNEGADGVGNSSGNWHCDSQWLGDRVITTSTRTWALPTYNNHLYKQISNSTSGGSSNDNAYFGYSTPWGYFDFNRFHCHFSPRDWQRLINNNWGFRPKRLNFKLFNIQVKEVTQNEGTKTIANNLTSTIQVFTDSEYQLPYVLGSAHQGCLPPFPADVFMIPQYGYLTLNNGSQAVGRSSFYCLEYFPSQMLRTGNNFQFTYTFEDVPFHSSYAHSQSLDRLMNPLIDQYLYYLSRTQTTGGTTNTQTLGFSQGGPNTMANQAKNWLPGPCYRQQRVSKTFADNNNSEYSWTGATKYHLNGRDSLVNPGPAMASHKDDEEKFFPQSGVLIFGKQGSEKTNVDIEKVMITDEEEIRTTNPVATEQYGSVSTNLQRGNRQAATADVNTQGVLPGMVWQDRDVYLQGPIWAKIPHTDGHFHPSPLMGGFGLKHPPPQILIKNTPVPADPPTTFNQSKLNSFITQYSTGQVSVEIEWELQKENSKRWNPEIQYTSNYYKSTSVDFAVNTEGVYSEPRPIGTRYLTRNL

SEQ ID NO: 377 - DNA, 2217 bp, Artificial Sequence
  Synthetic polynucleotide
atggctgccgatggttatcttccagattggctcgaggacactctctctgaaggaataagacagtggtgggcgctgaaacctggagccccgaagcccaaagccaaccagcaaaagcaggacgacggccggggtctggtgcttcctggctacaagtacctcggacccttcaacggactcgacaagggggagcccgtcaacgcggcggatgcagcggccctcgagcacgacaaggcctacgaccagcagctcaaagcgggtgacaatccgtacctgcggtataaccacgccgacgccgagtttcaggagcgtctgcaagaagatacgtcttttgggggcaacctcgggcgagcagtcttccaggccaagaagcgggttctcgaacctctcggtctggttgaggaaggcgctaagacggctcctggaaagaagagaccggtagagccatcaccccagcgttctccagactcctctacgggcatcggcaagaaaggccaacagcccgccagaaaaagactcaattttggtcagactggcgactcagagtcagttccagaccctcaacctctcggagaaccaccagcagcccccacaagtttgggatctaatacaatggcttcaggcggtggcgcaccaatggcagacaataacgagggtgccgatggagtgggtaattcctcaggaaattggcattgcgattcccaatggctgggcgacagagtcatcaccaccagcacccgcacctgggccttgcccacctacaataaccacctctacaagcaaatctccagtgcttcaacgggggccagcaacgacaaccactacttcggctacagcaccccctgggggtattttgactttaaccgcttccactgccacttctcgccaagagactggcaaagactcatcaacaacaattggggattccggcccaagagactcaacttcaaactcttcaacatccaagtcaaggaggtcacgacgaatgatggcgtcacgaccatcgccaataacctcaccagcaccatccaggtgtttacggactcggagtaccagctgccgtacgttctcggctctgcccaccagggctgcctgcctccgttcccggcggacgtgttcatgattccccagtatggatacctcaccctgaacaacggaagtcaagcggtgggacgctcatccttttactgcctggagtacttcccttcgcagatgctaaggactggaaataacttccaattcagctataccttcgaggatgtaccttttcacagcagctacgctcacagccagagtttggatcgcttgatgaatcctcttattgatcagtatctgtactacctgaacagaacgcaaggaacaacctctggaacaaccaaccaatcacggctgctttttagccaggctgggcctcagtctatgtctttgcaggccagaaattggctacctgggccctgctaccggcaacagagactttcaaagactgctaacgacaacaacaacagtaactttccttggacagcagccagcaaatatcatctcaatggccgcgactcgctggtgaatccaggaccagctatggccagtcacaaggacgatgaagaaaaatttttccctatgcacggcaatctaatatttggcaaagaagggacaacggcaagtaacgcagaattagataatgtaatgattacggatgaagaagagattcgtaccaccaatcctgtggcaacagagcagtatggaactgtggcaaataacttgcagagctcaaatacagctcccacgactagaactgtcaatgatcagggggccttacctggcatggtgtggcaagatcgtgacgtgtaccttcaggggcccatctgggcaaagattccacacacggacggacattttcacccctctcccctcatgggtggattcggacttaaacaccctcctccgcagattctcatcaagaacaccccggtacctgcgaatccttcgaccaccttcagtgcggcaaagtttgcttccttcatcacacagtactccacgggacaggtcagcgtggagatcgagtgggagctgcagaaggaaaacagcaagcgctggaacccggagatccagtacacttccaactattacaagtctaataatgttgaatttgctgttaatactgaaggtgtatatagtgaaccccgccccattggcaccagatacctgactcgtaatctgtaa

SEQ ID NO: 378 - protein, 738 aa, Artificial Sequence
  Synthetic polypeptide
MAADGYLPDWLEDTLSEGIRQWWALKPGAPKPKANQQKQDDGRGLVLPGYKYLGPFNGLDKGEPVNAADAAALEHDKAYDQQLKAGDNPYLRYNHADAEFQERLQEDTSFGGNLGRAVFQAKKRVLEPLGLVEEGAKTAPGKKRPVEPSPQRSPDSSTGIGKKGQQPARKRLNFGQTGDSESVPDPQPLGEPPAAPTSLGSNTMASGGGAPMADNNEGADGVGNSSGNWHCDSQWLGDRVITTSTRTWALPTYNNHLYKQISSASTGASNDNHYFGYSTPWGYFDFNRFHCHFSPRDWQRLINNNWGFRPKRLNFKLFNIQVKEVTTNDGVTTIANNLTSTIQVFTDSEYQLPYVLGSAHQGCLPPFPADVFMIPQYGYLTLNNGSQAVGRSSFYCLEYFPSQMLRTGNNFQFSYTFEDVPFHSSYAHSQSLDRLMNPLIDQYLYYLNRTQGTTSGTTNQSRLLFSQAGPQSMSLQARNWLPGPCYRQQRLSKTANDNNNSNFPWTAASKYHLNGRDSLVNPGPAMASHKDDEEKFFPMHGNLIFGKEGTTASNAELDNVMITDEEEIRTTNPVATEQYGTVANNLQSSNTAPTTRTVNDQGALPGMVWQDRDVYLQGPIWAKIPHTDGHFHPSPLMGGFGLKHPPPQILIKNTPVPANPSTTFSAAKFASFITQYSTGQVSVEIEWELQKENSKRWNPEIQYTSNYYKSNNVEFAVNTEGVYSEPRPIGTRYLTRNL

SEQ ID NO: 379 - DNA, 2208 bp, Artificial Sequence; identical to SEQ ID NO: 15
  Synthetic polynucleotide

SEQ ID NO: 380 - protein, 735 aa, Artificial Sequence [sequence omitted]

SEQ ID NO: 381 - DNA, 2208 bp, Artificial Sequence
  Synthetic polynucleotide
atggctgccgatggttatcttccagattggctcgaggacaacctctctgagggcattcgcgagtggtgggcgctgaaacctggagccccgaagcccaaagccaaccagcaaaagcaggacgacggccggggtctggtgcttcctggctacaagtacctcggacccttcaacggactcgacaagggggagcccgtcaacgcggcggacgccgcggccctcgagcacgacaaggcctacgaccagcagctgcaggcgggtgacaatccgtacctgcggtataaccacgccgacgccgagtttcaggagcgtctgcaagaagatacgtcttttgggggcaacctcgggcgagcagtcttccaggccaaaaagaggcttcttgaacctcttggtctggttgaggaagcagctaaaacggctcctggaaagaagaggcctgtagagcagtctcctcaggaaccggactcctccgcgggtattggcaaatcgggtgcacagcccgccaaaaagagactcaatttcggtcagactggcgactcagagtcagtcccagaccctcaacctctcggagaaccaccagcagcccccacaagtttgggatctaatacaatggcttcaggcggtggcgcaccaatggcagacaataacgaaggcgccgacggagtgggtaatgcctcaggaaattggcattgcgattccacatggctgggcgacagagtcatcaccaccagcacccgcacctgggccttgcccacctacagcaaccatctctacaagcaaatctccagccaatcaggagcttcaaacgacaacgactactttggctacagcaccccttgggggtattttgatttcaacagattccactgccacttttcaccacgtgactggcaaagactcatcaacaacaactggggattccgacccaagagactcaacttcaagctctttaacattcaagtcaaagaggtcacgcagaatgacggtacgacgacgattgccaataaccttaccagcacggttcaggtgtttactgactcggagtaccagctcccgtacgtcctcggctcggcgcatcaaggatgcctcccgccgttcccagcagacgtcttcatggtgccacagtatggatacctcaccctgaacaacgggagtcaggcagtaggacgctcttcattttactgcctggagtactttccttctcagatgctgcgtaccggaaacaactttaccttcagctacacttttgaggacgttcctttccacagcagctacgctcacagccagagtctggaccgtctcatgaatcctctcatcgaccagtacctgtattacttgagcagaacaaacactccaagtggaaccaccacgcagtcaaggcttcagttttctcaggccggagcgagtgacattcgggaccagtctaggaactggcttcctggaccctgttaccgccagcagcgagtatcaaagacatctgaggataacaacaacagtgaatactcgtggactggagctaccaagtaccacctcaatggcagagactctctggtgaatccgggcccggccatggcaagccacaaggacgatgaagaaaagttttttcctcagagcggggttctcatctttgggaagcaaggctcagagaaaacaaatgtggacattgaaaaggtcatgattacagacgaagaggaaatcaggacaaccaatcccgtggctacggagcagtatggttctgtatctaccaacctccagagaggcaacagacaagcagctaccgcagatgtcaacacacaaggcgttcttccaggcatggtctggcaggacagagatgtgtaccttcaggggcccatctgggcaaagattccacacacggacggacattttcacccctctcccctcatgggtggattcggacttaaacaccctcctccacagattctcatcaagaacaccccggtacctgcgaatccttcgaccaccttcagtgcggcaaagtttgcttccttcatcacacagtactccacgggacaggtcagcgtggagatcgagtgggagctgcagaaggaaaacagcaaacgctggaatcccgaaattcagtacacttccaactacaacaagtctgttaatgtggactttactgtggacactaatggcgtgtattcagagcctcgccccattggcaccagatacctgactcgtaatctgtaa

SEQ ID NO: 382 - protein, 735 aa, Artificial Sequence
  Synthetic polypeptide
MAADGYLPDWLEDNLSEGIREWWALKPGAPKPKANQQKQDDGRGLVLPGYKYLGPFNGLDKGEPVNAADAAALEHDKAYDQQLQAGDNPYLRYNHADAEFQERLQEDTSFGGNLGRAVFQAKKRLLEPLGLVEEAAKTAPGKKRPVEQSPQEPDSSAGIGKSGAQPAKKRLNFGQTGDSESVPDPQPLGEPPAAPTSLGSNTMASGGGAPMADNNEGADGVGNASGNWHCDSTWLGDRVITTSTRTWALPTYSNHLYKQISSQSGASNDNDYFGYSTPWGYFDFNRFHCHFSPRDWQRLINNNWGFRPKRLNFKLFNIQVKEVTQNDGTTTIANNLTSTVQVFTDSEYQLPYVLGSAHQGCLPPFPADVFMVPQYGYLTLNNGSQAVGRSSFYCLEYFPSQMLRTGNNFTFSYTFEDVPFHSSYAHSQSLDRLMNPLIDQYLYYLSRTNTPSGTTTQSRLQFSQAGASDIRDQSRNWLPGPCYRQQRVSKTSEDNNNSEYSWTGATKYHLNGRDSLVNPGPAMASHKDDEEKFFPQSGVLIFGKQGSEKTNVDIEKVMITDEEEIRTTNPVATEQYGSVSTNLQRGNRQAATADVNTQGVLPGMVWQDRDVYLQGPIWAKIPHTDGHFHPSPLMGGFGLKHPPPQILIKNTPVPANPSTTFSAAKFASFITQYSTGQVSVEIEWELQKENSKRWNPEIQYTSNYNKSVNVDFTVDTNGVYSEPRPIGTRYLTRNL

SEQ ID NO: 383 - DNA, 2208 bp, Artificial Sequence
  Synthetic polynucleotide
atggctgccgatggttatcttccagattggctcgaggacaacctctctgagggcattcgcgagtggtgggcgctgaaacctggagccccgaagcccaaagccaaccagcaaaagcaggacgacggccggggtctggtgcttcctggctacaagtacctcggacccttcaacggactcgacaagggggagcccgtcaacgcggcggacgcagcggccctcgagcacgacaaggcctacgaccagcagctgcaggcgggtgacaatccgtacctgcggtataaccacgccgacgccgagttccaggagcgtctgcaagaagatacgtcttttgggggcaacctcgggcgagcagtcttccaggccaagaagagggttctcgaaccttttggtctggttgaggaaggtgctaagacggctcctggaaagaaacgtccggtagagcagtcgccacaagagccagactcctcctcgggcattggcaagacaggccagcagcccgctaaaaagagactcaattttggtcagactggcgactcagagtcagtcccagaccctcaacctctcggagaaccaccagcagcccccacaagtttgggatctaatacaatggcttcaggcggtggcgcaccaatggcagacaataacgagggcgccgacggagtgggtaattcctcgggaaattggcattgcgattccacatggatgggcgacagagtcatcaccaccagcacccgaacctgggccctgcccacctacaacaaccacctctacaaacaaatttccagccaatcaggagcttcaaacgacaaccactactttggctacagcaccccttgggggtattttgactttaacagattccactgccacttttcaccacgtgactggcagcgactcattaacaacaactggggattccggcccaagaaactcaacttcaagctctttaacatccaggtcaaggaggtcacgcagaatgaaggcaccaagaccatcgccaataacctcaccagcaccatccaggtgtttacggactcggagtaccagctgccgtacgttctcggctctgcccaccagggctgcctgcctccgttcccggcggacgtgttcatgattccccagtacggctacctaacactcaacaacggtagtcaggccgtgggacgctcctccttctactgcctggaatactttccttcgcagatgctgagaaccggcaacaacttccagtttacttacaccttcgaggacgtgcctttccacagcagctacgcccacagccagagcttggaccggctgatgaatcctctgattgaccagtacctgtattacttgtctcggactcaaacaacaggaggcacgacaaatacgcagactctgggcttcagccaaggtgggcctaatacaatggccaatcaggcaaagaactggctgcctggaccctgttaccgccagcagcgagtatcaaagacatctgcggataacaacaacagtgaatactcgtggactggagctaccaagtaccacctcaatggcagagactctctggtgaatccgggcccggccatggcaagccacaaggacgatgaagaaaagttttttcctcagagcggggttctcatctttgggaagcaaggctcagagaaaacaaatgtggacattgaaaaggttatgattacagacgaagaggaaatcaggacaaccaatcccgtggctacggagcagtatggttctgtatctaccaacctccagagaggcaacagacaagcagctaccgcagatgtcaacacacagggcgttcttccaggcatggtctggcaggacagagatgtgtaccttcagggtcccatttgggccaaaattcctcacacagatggacactttcacccgtcccctcttatgggcggctttggactcaagaacccgcctcctcagatcctcatcaaaaacacgcctgttcctgcgaatcctccggcagagttttcagctacaaagtttgcttcattcatcacccaatactccacaggacaagtgagtgtggaaattgaatgggagctgcagaaagaaaacagcaagcgctggaatcccgaagtgcagtacacatccaattatgcaaaatctgccaacgttgattttactgtggacactaatggcgtgtattcagagcctcgccccattggcaccagatacctcacccgtaatctgtaa

SEQ ID NO: 384 - protein, 735 aa, Artificial Sequence
  Synthetic polypeptide
MAADGYLPDWLEDNLSEGIREWWALKPGAPKPKANQQKQDDGRGLVLPGYKYLGPFNGLDKGEPVNAADAAALEHDKAYDQQLQAGDNPYLRYNHADAEFQERLQEDTSFGGNLGRAVFQAKKRVLEPFGLVEEGAKTAPGKKRPVEQSPQEPDSSSGIGKTGQQPAKKRLNFGQTGDSESVPDPQPLGEPPAAPTSLGSNTMASGGGAPMADNNEGADGVGNSSGNWHCDSTWMGDRVITTSTRTWALPTYNNHLYKQISSQSGASNDNHYFGYSTPWGYFDFNRFHCHFSPRDWQRLINNNWGFRPKKLNFKLFNIQVKEVTQNEGTKTIANNLTSTIQVFTDSEYQLPYVLGSAHQGCLPPFPADVFMIPQYGYLTLNNGSQAVGRSSFYCLEYFPSQMLRTGNNFQFTYTFEDVPFHSSYAHSQSLDRLMNPLIDQYLYYLSRTQTTGGTTNTQTLGFSQGGPNTMANQAKNWLPGPCYRQQRVSKTSADNNNSEYSWTGATKYHLNGRDSLVNPGPAMASHKDDEEKFFPQSGVLIFGKQGSEKTNVDIEKVMITDEEEIRTTNPVATEQYGSVSTNLQRGNRQAATADVNTQGVLPGMVWQDRDVYLQGPIWAKIPHTDGHFHPSPLMGGFGLKNPPPQILIKNTPVPANPPAEFSATKFASFITQYSTGQVSVEIEWELQKENSKRWNPEVQYTSNYAKSANVDFTVDTNGVYSEPRPIGTRYLTRNL

SEQ ID NO: 385 - DNA, 2214 bp, Artificial Sequence; identical to SEQ ID NO: 375
  Synthetic polynucleotide

SEQ ID NO: 386 - protein, 737 aa, Artificial Sequence; identical to SEQ ID NO: 376
  Synthetic polypeptide

SEQ ID NO: 387 - DNA, 2196 bp, Artificial Sequence
  Synthetic polynucleotide
atggctgctgacggttatcttccagattggctcgaggacaacctctctgagggcattcgcgagtggtgggcgctgaaacctggagccccgcaacccaaagccaaccagcaaaagcaggacgacggccggggtctggtgcttcctggctacaagtacctcggacccttcaacggactcgacaagggggagcccgtcaacgaggcggacgccgcggccctcgagcacgacaaggcctacgaccagcagctcaaagcgggtgacaatccgtacctgcggtataatcacgccgacgccgagtttcaagagcgtctgcaagaagatacgtcctttgggggcaacctcgggcgagcagtcttccaggccaaaaagagggtactcgagcctctgggtctggttgaggaaggcgctaagacggctcctggaaagaagcggccagtagaaccggactccagctcgggcatcggcaagtcaggccagcagcccgcgaaaaagagactgaattttgggcagactggcgactcagagtcagtgcctgacccccaacctctctcagaaccacccgcaggtccctctggtctgggatctggtacaatggctgctggcggtggcgctccaatggcagacaataacgaaggcgccgacggagtgggtaatgtctcaggaaattggcattgcgattccacatggctgggcgaccgagtcatcaccaccagcactcggacctgggccctccccacctacaacaaccacctctacaagcaaatctccaacgggacctcgggaggcagcagcaacgacaacacctactttggctacagcaccccctgggggtattttgactttaacagattccactgccacttttcaccacgtgactggcagcgactcatcaacaacaactgggggttccggcccaagaagctcaacttcaagctcttcaacatccaggtcaaggaggtcacccagaatgaaggcaccaagaccatcgccaataacctcaccagcacggtgcaggtctttacggactcggagtaccagctcccgtacgtgctcggctctgcccaccagggctgcctgcctccgttcccggcggacgtgttcatgattccgcagtacgggtacctgacgctgaacaacgggagccaggccgtggggcgatcctccttctactgcctggagtactttccctcgcagatgctgagaacgggcaacaactttaccttcagctacaccttcgaggacgtgcccttccacagcagctacgcgcacagccagagcctggaccggctgatgaacccgctgattgaccagtacctgtactacctgtctcggactcagaccaacgggaccaatgccacgcagactctgttgtttgctcaggccgggcctcagaacatgtcggctcaggccaagaactggctgcctggtccttgctatcggcagcagcgcgtctctacgacagtgtcgcaaaacaacaacagcaactttacctggaccggggcgaccaagtaccacctgaacggccgagactccctggtgagccccggtgtcgccatggcaacgcacaaggacgacgaggagcgcttcttcccgagcagcggggtcctgatgtttggcaagcagggcgctggaaaggacaatgtcgagtacaccaacgtgatgctcaccagcgaggaggagatcaagaccaccaaccctgtggccacggagcagtacggcgtggtggctgacaatctgcagcagaccaactcagctcccattgtgggggcagtcaacagccagggggccttacccggtatggtctggcagaaccgggacgtgtacctgcagggtcccatctgggccaagatcccgcatacggacggcaactttcacccgtctcctctcatgggcggctttggactgaaacacccgcctccccagatcctgatcaaaaacacgccggtacctgcggatcccccggtgaactttacggacgctaagctggcgagtttcatcacgcagtacagcaccgggcaggtcagcgtggagattgagtgggagctgcagaaggagaacagcaagcgctggaatcccgagattcagtacacttccaattattataaatcagctaatgtggactttgccgtcaatgcagatggtgtatatagtgaaccccgccccattggcactcgttacctcacccgtaatctgtaa

SEQ ID NO: 388 - protein, 731 aa, Artificial Sequence
  Synthetic polypeptide
MAADGYLPDWLEDNLSEGIREWWALKPGAPQPKANQQKQDDGRGLVLPGYKYLGPFNGLDKGEPVNEADAAALEHDKAYDQQLKAGDNPYLRYNHADAEFQERLQEDTSFGGNLGRAVFQAKKRVLEPLGLVEEGAKTAPGKKRPVEPDSSSGIGKSGQQPAKKRLNFGQTGDSESVPDPQPLSEPPAGPSGLGSGTMAAGGGAPMADNNEGADGVGNVSGNWHCDSTWLGDRVITTSTRTWALPTYNNHLYKQISNGTSGGSSNDNTYFGYSTPWGYFDFNRFHCHFSPRDWQRLINNNWGFRPKKLNFKLFNIQVKEVTQNEGTKTIANNLTSTVQVFTDSEYQLPYVLGSAHQGCLPPFPADVFMIPQYGYLTLNNGSQAVGRSSFYCLEYFPSQMLRTGNNFTFSYTFEDVPFHSSYAHSQSLDRLMNPLIDQYLYYLSRTQTNGTNATQTLLFAQAGPQNMSAQAKNWLPGPCYRQQRVSTTVSQNNNSNFTWTGATKYHLNGRDSLVSPGVAMATHKDDEERFFPSSGVLMFGKQGAGKDNVEYTNVMLTSEEEIKTTNPVATEQYGVVADNLQQTNSAPIVGAVNSQGALPGMVWQNRDVYLQGPIWAKIPHTDGNFHPSPLMGGFGLKHPPPQILIKNTPVPADPPVNFTDAKLASFITQYSTGQVSVEIEWELQKENSKRWNPEIQYTSNYYKSANVDFAVNADGVYSEPRPIGTRYLTRNL

SEQ ID NO: 389 - DNA, 2196 bp, Artificial Sequence
  Synthetic polynucleotide
atggctgctgacggttatcttccagattggctcgaggacaacctctctgagggcattcgcgagtggtgggcgctgaaacctggagccccgcaacccaaagccaaccagcaaaagcaggacgacggccggggtctggtgcttcctggctacaagtacctcggacccttcaacggactcgacaagggggagcccgtcaacgaggcggacgccgcggccctcgagcacgacaaggcctacgaccagcagctcaaagcgggtgacaatccgtacctgcggtataatcacgccgacgccgagtttcaagagcgtctgcaagaagatacgtcctttgggggcaacctcgggcgagcagtcttccaggccaaaaagagggtactcgagcctctgggtctggttgaggaaggcgctaagacggctcctggaaagaagcggccagtagaaccggactccagctcgggcatcggcaagtcaggccggcagcccgcgaaaaagagactgaattttgggcagactggcgactcagagtcagtgcctgacccccaacctctctcagaaccacccgcaggtccctctggtctgggatctggtacaatggctgcaggcggtggcgctccaatggcagacaataacgaaggcgccgacggagtgggtaatgcctcaggaaattggcattgcgattccacatggctgggcgaccgagtcatcaccaccagcactcggacctgggccctccccacctacaacaaccacctctacaagcaaatctccaacgggacctcgggaggcagcagcaacgacaacacctactttggctacagcaccccctgggggtattttgactttaacagattccactgccacttttcaccacgtgactggcagcgactcatcaacaacaactggggattccggcccaagaggctcaacttcaagctcttcaacatccaggtcaaggaggtcacccagaatgaaggcaccaagaccatcgccaataacctcaccagcacggtgcaggtctttacggactcgaagtaccagctcccgtacgtgctcggctctgcccaccagggctgcctgcctccgttcccggcggacgtgttcatgattccgcagtacgggtacctgacgctgaacaacgggagccaggccgtggggcgatcctccttctactgcctggagtactttccctcgcagatgctgagaacgggcaacaactttaccttcagctacaccttcgaggacgtgcccttccacagcagctacgcgcacagccagagcctggaccggctgatgaacccgctgattgaccagtacctgtactacctgtctcggactcagaccaacgggaccaatgccacgcagactctgttgtttgctcaggccgggcctcagaacatgtcggctcaggccaagaactggctgcctggtccttgctatcggcagcagcgcgtctctacgacagtgtcgcaaaacaacaacagcaactttacctggaccggggcgaccaagtaccacctgaacggccgagactccctggtgaaccccggtgtcgccatggcaacgcacaaggacgacgaggagcgcttcttcccgagcagcggggtcctgatgtttggcaagcagggcgctggaaaggacaatgtcgagtacaccaacgtgatgctcaccagcgaggaggagatcaagaccaccaaccctgtggccacggagcagtacggtgtggtggctgacaatctgcagcagaccaactcggctcccattgtgggggcagtcaacagccagggggccttacccggtatggtctggcagaaccgggacgtgtacctgcagggtcccatctgggccaagatcccgcatacggacggcaactttcacccgtctcctctcatgggcggctttggactgaaacacccgcctccccagatcctgatcaaaaacacgccggtacctgcggatcccccggtgaactttacggacgctaagctggcgagtttcatcacgcagtacagcaccgggcaggtcagcgtggagattgagtgggagctgcagaaggagaacagcaagcgctggaatcccgagattcagtacacttccaattattataaatcagctaatgtggactttgccgtcaatgcagatggtgtatatagtgaaccccgccccattggcactcgttacctcacccgtaatctgtaa

SEQ ID NO: 390 - protein, 731 aa, Artificial Sequence
  Synthetic polypeptide
MAADGYLPDWLEDNLSEGIREWWALKPGAPQPKANQQKQDDGRGLVLPGYKYLGPFNGLDKGEPVNEADAAALEHDKAYDQQLKAGDNPYLRYNHADAEFQERLQEDTSFGGNLGRAVFQAKKRVLEPLGLVEEGAKTAPGKKRPVEPDSSSGIGKSGRQPAKKRLNFGQTGDSESVPDPQPLSEPPAGPSGLGSGTMAAGGGAPMADNNEGADGVGNASGNWHCDSTWLGDRVITTSTRTWALPTYNNHLYKQISNGTSGGSSNDNTYFGYSTPWGYFDFNRFHCHFSPRDWQRLINNNWGFRPKRLNFKLFNIQVKEVTQNEGTKTIANNLTSTVQVFTDSKYQLPYVLGSAHQGCLPPFPADVFMIPQYGYLTLNNGSQAVGRSSFYCLEYFPSQMLRTGNNFTFSYTFEDVPFHSSYAHSQSLDRLMNPLIDQYLYYLSRTQTNGTNATQTLLFAQAGPQNMSAQAKNWLPGPCYRQQRVSTTVSQNNNSNFTWTGATKYHLNGRDSLVNPGVAMATHKDDEERFFPSSGVLMFGKQGAGKDNVEYTNVMLTSEEEIKTTNPVATEQYGVVADNLQQTNSAPIVGAVNSQGALPGMVWQNRDVYLQGPIWAKIPHTDGNFHPSPLMGGFGLKHPPPQILIKNTPVPADPPVNFTDAKLASFITQYSTGQVSVEIEWELQKENSKRWNPEIQYTSNYYKSANVDFAVNADGVYSEPRPIGTRYLTRNL

SEQ ID NO: 391 - DNA, 2196 bp, Artificial Sequence
  Synthetic polynucleotide
atggctgctgacggttatcttccagattggctcgaggacaacctctctgagggcattcgcgagtggtgggcgctgaaacctggagccccgcaacccaaagccaaccagcaaaagcaggacgacggccggggtctggtgcttcctggctacaagtacctcggacccttcaacggactcgacaagggggagcccgtcaacgaggcggacgccgcggccctcgagcacgacaaggcctacgaccagcagctcaaagcgggtgacaatccgtacctgcggtataatcacgccgacgccgagtttcaagagcgtctgcaagaagatacgtcctttgggggcaacctcgggcgagcagtcttccaggccaaaaagagggtactcgagcctctgggtctggttgaggaaggcgctaagacggctcctggaaagaagcggccagtagaaccggactccagctcgggcatcggcaagtcaggccagcagcccgcgaaaaagagactgaattttgggccgactggcgactcagagtcagtgcctgacccccaacctctctcagaaccacctgcaggtccctctggtctgggatctggtacaatggctgcaggcggtggcgctccaatggcagacaataacgaaggcgccgacggagtgggtaatgtctcaggaaattggcattgcgattccacatggctgggcgaccgagtcatcaccaccagcactcggacctgggccctccccacctacaacaaccacctctacaagcaaatctccaacgggacctcgggaggcagcagcaacgacaacacctactttggctacagcaccccctgggggtattttgactttaacagattccactgccacttttcaccacgcgactggcagcgactcatcaacaacaactggggattccggcccaagaagctcaacttcaagctcttcaacatccaggtcaaggaggtcacccagaatgaaggcaccaagaccaccgccaataacctcaccagcacggtgcaggtctttacggactcggagtaccagctcccgtacgtgctcggctctgcccaccagggctgcctgcctccgttcccggcggacgtgttcatgattccgcagtacgggtacctgacgctgaacaacgggagccaggccgtggggcgatcctccttctactgcctggagtactttccctcgcagatgctgagaacgggcaacaactttaccttcagctacaccttcgaggacgtgcccttccacagcagctacgcgcacagccagagcctggaccggctgatgaacccgctgattgaccagtacctgtactacctgtctcggactcagaccaacgggaccaatgccacgcagactctgttgtttgctcaggccgggcctcagaacatgtcggctcaggccaagaactggctgcctggtccttgctatcggcagcagcgcgtctctacggcagtgtcgcaaaacaacaacagcaactttacctggaccggggcgaccaagtaccacctgaacggccgagactccctggtgaaccccggtgtcgccatggcaacgcacaaggacgacgaggagcgcttcttcccgagcagcggggtcctgatgtttggcaagcagggcgctggaaaggacaatgtcgagtacaccaacgtgatgctcaccagcgaggaggagatcaagaccaccaaccctgtggccacggagcagtacggtgtggtggctgacaatctgcagcagaccaactcggctcccattgtgggggcagtcaacagccagggggccttacccggtatggtctggcagaaccgggacgtgtacctgcagggtcccatctgggccaagatcccgcatacggacggcaactttcacccgtctcctctcatgggcggctttggactgaaacacccgcctccccagatcctgatcaaaaacacgccggtacctgcggatcccccggtgaactttacggacgctaagctggcgagtttcatcacgcagtacagcaccgggcaggtcagcgtggagattgagtgggagctgcagaaggagaacagcaagcgctggaatcccgagattcagtacacttccaattattataaatcagctaatgtggactttgccgtcaatgcagatggtgtatatagcgaaccccgccccattggcactcgttacctcacccgtaatctgtaa

SEQ ID NO: 392 - protein, 731 aa, Artificial Sequence
  Synthetic polypeptide
MAADGYLPDWLEDNLSEGIREWWALKPGAPQPKANQQKQDDGRGLVLPGYKYLGPFNGLDKGEPVNEADAAALEHDKAYDQQLKAGDNPYLRYNHADAEFQERLQEDTSFGGNLGRAVFQAKKRVLEPLGLVEEGAKTAPGKKRPVEPDSSSGIGKSGQQPAKKRLNFGPTGDSESVPDPQPLSEPPAGPSGLGSGTMAAGGGAPMADNNEGADGVGNVSGNWHCDSTWLGDRVITTSTRTWALPTYNNHLYKQISNGTSGGSSNDNTYFGYSTPWGYFDFNRFHCHFSPRDWQRLINNNWGFRPKKLNFKLFNIQVKEVTQNEGTKTTANNLTSTVQVFTDSEYQLPYVLGSAHQGCLPPFPADVFMIPQYGYLTLNNGSQAVGRSSFYCLEYFPSQMLRTGNNFTFSYTFEDVPFHSSYAHSQSLDRLMNPLIDQYLYYLSRTQTNGTNATQTLLFAQAGPQNMSAQAKNWLPGPCYRQQRVSTAVSQNNNSNFTWTGATKYHLNGRDSLVNPGVAMATHKDDEERFFPSSGVLMFGKQGAGKDNVEYTNVMLTSEEEIKTTNPVATEQYGVVADNLQQTNSAPIVGAVNSQGALPGMVWQNRDVYLQGPIWAKIPHTDGNFHPSPLMGGFGLKHPPPQILIKNTPVPADPPVNFTDAKLASFITQYSTGQVSVEIEWELQKENSKRWNPEIQYTSNYYKSANVDFAVNADGVYSEPRPIGTRYLTRNL

SEQ ID NO: 393 - DNA, 4404 bp, Artificial Sequence
  Synthetic polynucleotide
atggctgccgatggttatcttccagattggctcgagggcaacctctctgagggcattcgcgagtggtgggacttgaaacctggagccccgaaacccaaagccaaccagcaaaagcaggacgacggccggggtctggtgcttcctggctacaggtacctcggacccttcaacggactcgacaagggagagccggtcaacgaggcagacgccgcggccctcgagcacgacaaggcctacgacaagcagctcgagcagggggacaacccgtacctcaagtacaaccacgccgacgccgagtttcaggagcgtcttcaagaagatacgtcttttgggggcaacctcgggcgagcagtcttccaggccaagaagcgggttctcgaacctctcggtctggttgaggaaggcgctaagacggctcctggaaagaagagacccatagaatcccccgactcctccacgggcatcggcaagaacggccagccgcccgctaaaaagaagctcaactttgggcagactggcgactcagagtcagtgcccgacccccaacctctcggagaacctcccgccgcgccctcaggtctgggatctggtacaatggctgcaggcggtggcgcaccaatggcagacaataacgaaggcgccgacggagtgggtaatgcctccggaaattggcattgcgattccacatggctgggcgacagagtcatcaccaccagcacccgcacctgggccctgcccacctacaacaaccacctctacaagcagatatcaagtcagagcggggctaccaacgacaaccacttcttcggctacagcaccccctggggctattttgacttcaacagattccactgccacttctcaccacgtgactggcagcgactcatcaacaacaactggggattccggcccagaaagctgcggttcaagttgttcaacatccaggtcaaggaggtcacgacgaacgacggcgttacgaccatcgctaataaccttaccagcacgattcaggtcttctcggactcggagtaccaactgccgtacgtcctcggctctgcgcaccagggctgcctccctccgttccctgcggacgtgttcatgattcctcagtacggatatctgactctaaacaacggcagtcagtctgtgggacgttcctccttctactgcctggagtactttccttctcagatgctgagaacgggcgataactttgaattcagctacacctttgaggaagtgcctttccacagcagctatgcgcacagccagagcctggaccggctgatgaatcccctcatcgaccagtacctgtactacctggcccggacccagagcactacggggtccacaagggagctgcagttccatcaggctgggcccaacaccatggccgagcaatcaaagaactggctgcccggaccctgttatcggcagcagagactgtcaaaaaacatagacagcaacaacaacagtaactttgcctggaccggggccactaaataccatctgaatggtagaaattcattaaccaacccgggcgtagccatggccaccaacaaggacgacgaggaccagttctttcccatcaacggagtgctggtttttggcaaaacgggggctgccaacaagacaacgctggaaaacgtgctaatgaccagcgaggaggagatcaaaaccaccaatcccgtggctacagaagaatacggtgtggtctccagcaacctgcaatcgtctacggccggaccccagacacagactgtcaacagccagggggctctgcccggcatggtctggcagaaccgggacgtgtacctgcagggtcccatctgggccaaaattcctcacacggacggcaactttcacccgtctcccctgatgggcggatttggactcaaacacccgcctcctcaaattctcatcaaaaacaccccggtacctgctaatcctccagaggtgtttactcctgccaagtttgcctcatttatcacgcagtacagcaccggccaggtcagcgtggagatcgagtgggaactgcagaaagaaaacagcaaacgctggaatccagagattcagtacacctcaaattatgccaagtctaataatgtggaatttgctgtcaacaacgaaggggtttatactgagcctcgccccattggcacccgttacctcacccgtaacctgtaaatggctgccgatggttatcttccagattggctcgaggacaacctctctgagggcattcgcgagtggtgggacttgaaacctggagccccgaaacccaaagccaaccagcaaaagcaggacgacggccggggtctggtgcttcctggctacaagtacctcggacccttcaacggactcgacaagggggagcccgtcaacgcggcggacgcagcggccctcgagcacgacaaggcctacgaccagcagctcaaagcgggtgacaatccgtacctgcggtataaccacgccgacgccgagtttcaggagcgtctgcaagaagatacgtcttttgggggcaacctcgggcgagcagtcttccaggccaagaagcgggttctcgaacctctcggtctggttgaggaaggcgctaagacggctcctggaaagaagagaccggtagagccatcaccccagcgttctccagactcctctacgggcatcggcaagaaaggccagcagcccgcgaaaaagagactcaactttgggcagactggcgactcagagtcagtgcccgaccctcaaccaatcggagaaccccccgcaggcccctctggtctgggatctggtacaatggctgcaggcggtggcgctccaatggcagacaataacgaaggcgccgacggagtgggtagttcctcaggaaattggcattgcgattccacatggctgggcgacagagtcatcaccaccagcacccgaacctgggccctccccacctacaacaaccacctctacaagcaaatctccaacgggacttcgggaggaagcaccaacgacaacacctacttcggctacagcaccccctgggggtattttgactttaacagattccactgccacttctcaccacgtgactggcagcgactcatcaacaacaactggggattccggcccaagagactcaacttcaagctcttcaacatccaggtcaaggaggtcacgcagaatgaaggcaccaagaccatcgccaataaccttaccagcacgattcaggtctttacggactcggaataccagctcccgtacgtcctcggctctgcgcaccagggctgcctgcctccgttcccggcggacgtcttcatgattcctcagtacgggtacctgactctgaacaatggcagtcaggccgtgggccgttcctccttctactgcctggagtactttccttctcaaatgctgagaacgggcaacaactttgagttcagctaccagtttgaggacgtgccttttcacagcagctacgcgcacagccaaagcctggaccggctgatgaaccccctcatcgaccagtacctgtactacctgtctcggactcagtccacgggaggtaccgcaggaactcagcagttgctattttctcaggccgggcctaataacatgtcggctcaggccaaaaactggctacccgggccctgctaccggcagcaacgcgtctccacgacactgtcgcaaaataacaacagcaactttgcctggaccggtgccaccaagtatcatctgaatggcagagactctctggtaaatcccggtgtcgctatggcaacccacaaggacgacgaagagcgattttttccgtccagcggagtcttaatgtttgggaaacagggagctggaaaagacaacgtggactatagcagcgttatgctaaccagtgaggaagaaattaaaaccaccaacccagtggccacagaacagtacggcgtggtggccgataacctgcaacagcaaaacgccgctcctattgtaggggccgtcaacagtcaaggagccttacctggcatggtctggcagaaccgggacgtgtacctgcagggtcctatctgggccaagattcctcacacggacggaaactttcatccctcgccgctgatgggaggctttggactgaaacacccgcctcctcagatcctgattaagaatacacctgttcccgcggatcctccaactaccttcagtcaagctaagctggcgtcgttcatcacgcagtacagcaccggacaggtcagcgtggaaattgaatgggagctgcagaaagaaaacagcaaacgctggaacccagagattcaatacacttccaactactacaaatctacaaatgtggactttgctgttaacacagatggcacttattctgagcctcgccccatcggcacccgttacctcacccgtaatctgtaa

SEQ ID NO: 394 - protein, 738 aa, Artificial Sequence; identical to SEQ ID NO: 12
  Synthetic polypeptide

SEQ ID NO: 395 - DNA, 3129 bp, Artificial Sequence
  Synthetic polynucleotide
gaattcgccctttctacggctgcgtcaactggaccaatgagaactttcccttcaacgattgcgtcgacaagatggtgatctggtgggaggagggcaagatgacggccaaggtcgtggagtccgccaaggccattctcggcggcagcaaagtgcgcgtggaccaaaagtgcaagtcgtccgcccagatcgaccccacccccgtgatcgtcacctccaacaccaacatgtgcgccgtgattgacgggaacagcaccaccttcgagcaccagcagccgttgcaggaccggatgttcaagtttgaactcacccgccgtctggagcacgactttggcaaggtgacaaagcaggaagtcagagagttcttccgctgggcgcaggatcacgtgaccgaggtggcgcacgagttctacgtcagaaagggtggagccaacaagagacccgcccccgatgacgcggataaaagcgagcccaagcgggcctgcccctcagtcgcggatccatcgacgtcagacgcggaaggagctccggtggactttgccgacaggtaccaaaacaaatgttctcgtcacgcgggcatgcttcagatgctgtttccctgcaaaacatgcgagagaatgaatcagaatttcaacatttgcttcacgcacgggaccagagactgttcagaatgtttccccggcgtgtcagaatctcaaccggtcgtcagaaaaaagacgtatcggaaactctgtgcgattcatcatctgctgggggcgggcacccgagattgcttgctcggcctgcgatctggtcaacgtggacctagatgactgtgtttctgagcaataaatgacttaaaccaggtatggctgccgatggttatcttccagattggctcgaggacaacctctctgagggcattcgcgagtggtgggacttgaaacctggagccccgaaacccaaagccaaccagcaaaagcaggacgacggccggggtctggtgcttcctggctacaagtacctcggacccttcaacggactcgacaagggggagcccgtcaacgcggcggacgcagcggccctcgagcacgacaaggcctacgaccagcagctcaaagcgggtgacaatccgtacctgcggtataaccacgccgacgccgagtttcaggagcgtctgcaagaagatacgtcttttgggggcaacctcgggcgagcagtcttccaggccaagaagcgggttctcgaacctctcggtctggttgaggaaggcgctaagacggctcctggaaagaagagaccggtagagccatcaccccagcgttctccagactcctctacgggcatcggcaagaaaggccagcagcccgcgaaaaagagactcaactttgggcagactggcgactcagagtcagtgcccgaccctcaaccaatcggagaaccccccgcaggcccctctggtctgggatctggtacaatggctgcaggcggtggcgctccaatggcagacaataacgaaggcgccgacggagtgggtagttcctcaggaaattggcattgcgattccacatggctgggcgacagagtcatcaccaccagcacccgaacctgggccctccccacctacaacaaccacctctacaagcaaatctccaacgggacttcgggaggaagcaccaacgacaacacctacttcggctacagcaccccctgggggtattttgactttaacagattccactgccacttctcaccacgtgactggcagcgactcatcaacaacaactggggattccggcccaagagactcaacttcaagctcttcaacatccaggtcaaggaggtcacgcagaatgaaggcaccaagaccatcgccaataaccttaccagcacgattcaggtctttacggactcggaataccagctcccgtacgtcctcggctctgcgcaccagggctgcctgcctccgttcccggcggacgtcttcatgattcctcagtacgggtacctgactctgaacaatggcagtcaggccgtgggccgttcctccttctactgcctggagtactttccttctcaaatgctgagaacgggcaacaactttgagttcagctaccagtttgaggacgtgccttttcacagcagctacgcgcacagccaaagcctggaccggctgatgaaccccctcatcgaccagtacctgtactacctgtctcggactcagtccacgggaggtaccgcaggaactcagcagttgctattttctcaggccgggcctaataacatgtcggctcaggccaaaaactggctacccgggccctgctaccggcagcaacgcgtctccacgacactgtcgcaaaataacaacagcaactttgcctggaccggtgccaccaagtatcatctgaatggcagagactctctggtaaatcccggtgtcgctatggcaacccacaaggacgacgaagagcgattttttccgtccagcggagtcttaatgtttgggaaacagggagctggaaaagacaacgtggactatagcagcgttatgctaaccagtgaggaagaaattaaaaccaccaacccagtggccacagaacagtacggcgtggtggccgataacctgcaacagcaaaacgccgctcctattgtaggggccgtcaacagtcaaggagccttacctggcatggtctggcagaaccgggacgtgtacctgcagggtcctatctgggccaagattcctcacacggacggaaactttcatccctcgccgctgatgggaggctttggactgaaacacccgcctcctcagatcctgattaagaatacacctgttcccgcggatcctccaactaccttcagtcaagctaagctggcgtcgttcatcacgcagtacagcaccggacaggtcagcgtggaaattgaatgggagctgcagaaagaaaacagcaaacgctggaacccagagattcaatacacttccaactactacaaatctacaaatgtggactttgctgttaacacagatggcacttattctgagcctcgccccatcggcacccgttacctcacccgtaatctgtaattgcttgttaatcaataaaccggttgattcgtttcagttgaactttggtctctgcgaagggcgaattc

SEQ ID NO: 396 - protein, 738 aa, Artificial Sequence; identical to SEQ ID NO: 12
  Synthetic polypeptide

SEQ ID NO: 397 - protein, 733 aa, Artificial Sequence
  Synthetic polypeptide
MAADGYLPDWLEDNLSEGIREWWDLRPGAPKPKANQQKQDDGRGLVLPGYKYLGPFNGLDKGEPVNEADAAALEHDKAYDKQLEQGDNPYLKYNHADAEFQERLQEDTSFGGNLGRAVFQAKKRVLEPLGLVEEGAKTAPGKKRPIESPDSSTGIGKKGQQPAKKRLNFGQTGDSESVPDPQPIGEPPAGPSGLGSGTMAAGGGAPMADNNEGADGVGSSSGNWHCDSTWLGDRVITTSTRTWALPTYNNHLYKQISNGTSGGSTNDNTYFGYSTPWGYFDFNRFHCHFSPRDWQRLINNNWGFRPKRLNFKLFNIQVKEVTQNEGTKTIANNLTSTIQVFTDSEYQLPYVLGSAHQGCLPPFPADVFMIPQYGYLTLNNGSQAVGRSSFYCLEYFPSQMLRTGNNFEFSYQFEDVPFHSSYAHSQSLDRLMNPLIDQYLYYLSRTQSTGGTAGTQQLLFSQAGPNNMSAQAKNWLPGPCYRQQRVSTTVSQNNNSNFAWTGATKYHLNGRDSLVNPGVAMATHKGDEERFFPSSGVLMFGKQGAGKDNVDYSSVMLTSEEEIKTTNPVATEQYGVVADNLQQQNAAPIVGAVNSQGALPGMVWQNRDVYLQGPIWAKIPHTDGNFHPSPLMGGFGLKHPPPQILIKNTPVPADPPTTFSQAKLASFITQYSTGQVSVEIEWELQKENSKRWNPEIQYTSNYYKSTNVDFAVNTEGTYSEPRPIGTRYLTRNL

SEQ ID NO: 398 - DNA, 2501 bp, Artificial Sequence
  Synthetic polynucleotide
gaattcgcccttggctgcgtcaactggaccaatgagaactttcccttcaacgattgcgtcgacaagatggtgatctggtgggaggagggcaagatgacggccaaggtcgtggagtccgccaaggccattcatcatctgctggggcgggctcccgagattgcttgctcggcctgcgatctggtcaacgtggacctggatgactgtgtttctgagcaataaatgacttaaaccaggtatggctgccgatggttatcttccagattggctcgaggacaacctctctgagggcattcgcgagtggtgggacttgagacctggagccccgaaacccaaagccaaccagcaaaagcaggacgacggccggggtctggtgcttcctggctacaagtacctcggacccttcaacggactcgacaagggagagccggtcaacgaggcagacgccgcggccctcgagcacgacaaggcctacgacaagcagctcgagcagggggacaacccgtacctcaagtacaaccacgccgacgccgagtttcaggagcgtcttcaagaagatacgtcttttgggggcaacctcgggcgagcagtcttccaggccaagaagcgggttctcgaacctctcggtctggttgaggaaggcgctaagacggctcctggaaagaagagacccatagaatcccccgactcctccacgggcatcggcaagaaaggccagcagcccgctaaaaagagactcaactttgggcagactggcgactcagagtcagtgcccgaccctcaaccaatcggagaaccccccgcaggcccctctggtctgggatctggcacaatggctgcaggcggtggcgctccaatggcagacaataacgaaggcgccgacggagtgggtagttcctcaggaaattggcattgcgattccacatggctgggcgacagagtcatcaccaccagcacccgaacctgggccctccccacctacaacaaccacctctacaagcaaatctccaacgggacatcgggaggaagcaccaacgacaacacctacttcggctacagcaccccctgggggtattttgactttaacagattccactgccacttctcaccacgtgactggcagcgactcatcaacaacaactggggattccggcccaagagactcaacttcaagctcttcaacatccaggtcaaggaggtcacgcagaatgaaggcaccaagaccatcgccaataaccttaccagcacgattcaggtctttacggactcggaataccagctcccgtacgtcctcggctctgcgcaccagggctgcctgcctccgttcccggcggacgtcttcatgattcctcagtacgggtacctgactctgaacaacggcagtcaggccgtgggccgttcctccttctactgcctggagtactttccttctcaaatgctgagaacgggcaacaactttgagttcagctaccagtttgaggacgtgccttttcacagcagctatgcgcacagccaaagcctggaccggctgatgaaccccctcatcgaccagtacctgtactacctgtctcggactcagtccacgggaggtaccgcaggaactcagcagttgctattttctcaggccgggcctaataacatgtcggctcaggccaaaaactggctacccgggccctgctaccggcagcaacgcgtctccacgacagtgtcgcaaaataacaacagcaactttgcttggaccggtgccaccaagtatcatctgaatggcagagactctctggtaaatcccggtgtcgctatggcaacgcacaagggcgacgaagagcgattttttccatccagcggagtcttgatgtttgggaaacagggagctggaaaagacaacgtagactatagcagcgttatgctaaccagtgaggaagaaatcaaaaccaccaacccagtggccacagaacagtacggcgtggtggccgataacctgcaacagcaaaacgccgctcctattgtaggggccgtcaacagtcaaggagccttacctggcatggtctggcagaaccgggacgtgtacctgcagggtcctatctgggccaagattcctcacacggacggcaactttcatccttcgccgctgatgggaggctttggactgaaacacccgcctcctcagatcctgattaagaatacacctgttcccgcggatcctccaactaccttcagtcaagccaagctggcgtcgttcatcacgcagtacagcaccggacaggtcagcgtggaaattgaatgggagctgcagaaagagaacagcaagcgctggaacccagagattcagtatacttccaactactacaaatctacaaatgtggactttgctgtcaatactgagggtacttattcagagcctcgccccattggcacccgttacctcacccgtaacctgtaattgcctgttaatcaataaaccggttgattcgtttcagttgaactttggtctcaagggcgaattc

SEQ ID NO: 399 - DNA, 2187 bp, Artificial Sequence
  Synthetic polynucleotide
atggctgccgatggttatcttccagattggctcgaggacaacctctctgagggcattcgcgagtggtgggacttgaaacctggagccccgaaacccaaagccaaccagcaaaagcaggacgacggccggggtctggtgcttcctggctacaagtacctcggacccttcaacggactcgacaagggagagccggtcaacgaggcagacgccgcggccctcgagcacgacaaggcctacgacaagcagctcgagcagggggacaacccgtacctcaagtacaaccacgccgacgccgagtttcaggagcgtcttcaagaagatacgtcttttgggggcaacctcgggcgagcagtcttccaggccaagaagcgggttctcgaacctctcggtctggttgaggaaggcgctaagacggctcctggaaagaagagacccatagaatcccccgactcctccacgggcatcggcaagaaaggccagcagcccgctaaaaagaagctcaactttgggcagactggcgactcagagtcagtgcccgacccccaacctctcggagaacctcccgccgcgccctcaggtctgggatctggtacaatggctgcaggcggtggcgcaccaatggcagacaataacgaaggcgccgacggagtgggtaatgcctccggaaattggcattgcgattccacatggctgggcgacagagtcatcaccaccagcacccgcacctgggccctgcccacctacaacaaccacctctacaagcagatatcaagtcagagcggggctaccaacgacaaccacttcttcggctacagcaccccctggggctattttgacttcaacagattccactgccacttctcaccacgtgactggcagcgactcatcaacaacaactggggattccggcccagaaagctgcggttcaagttgttcaacatccaggtcaaggaggtcacgacgaacgacggcgttacgaccatcgctaataaccttaccagcacgattcaggtcttctcggactcggagtaccaactgccgtacgtcctcggctctgcgcaccagggctgcctccctccgttccctgcggacgtgttcatgattcctcagtacggatatctgactctaaacaacggcagtcagtctgtgggacgttcctccttctactgcctggagtactttccttctcagatgctgagaacgggcaataactttgaattcagctacacctttgaggaagtgcctttccacagcagctatgcgcacagccagagcctggaccggctgatgaatcccctcatcgaccagtacctgtactacctggcccggacccagagcactacggggtccacaagggagctgcagttccatcaggctgggcccaacaccatggccgagcaatcaaagaactggctgcccggaccctgttatcggcagcagagactgtcaaaaaacatagacagcaacaacaacagtaactttgcctggaccggggccactaaataccatctgaatggtagaaattcattaaccaacccgggcgtagccatggccaccaacaaggacgacgaggaccagttctttcccatcaacggagtgctggtttttggcgaaacgggggctgccaacaagacaacgctggaaaacgtgctaatgaccagcgaggaggagatcaaaaccaccaatcccgtggctacagaagaatacggtgtggtctccagcaacctgcaatcgtctacggccggaccccagacacagactgtcaacagccagggggctctgcccggcatggtctggcagaaccgggacgtgtacctgcagggtcccatctgggccaaaattcctcacacggacggcaactttcacccgtctcccctgatgggcggatttggactcaaacacccgcctcctcaaattctcatcaaaaacaccccggtacctgctaatcctccagaggtgtttactcctgccaagtttgcctcatttatcacgcagtacagcaccggccaggtcagcgtggagatcgagtgggaactgcagaaagaaaacagcaaacgctggaatccagagattcagtacacctcaaattatgccaagtctaataatgtggaatttgctgtcaacaacgaaggggtttatactgagcctcgccccattggcacccgttacctcacccgtaacctgtaa

SEQ ID NO: 400 - protein, 728 aa, Artificial Sequence; identical to SEQ ID NO: 68
  Synthetic polypeptide

SEQ ID NO: 401 - protein, 728 aa, Artificial Sequence; identical to SEQ ID NO: 160
  Synthetic polypeptide

SEQ ID NO: 402 - protein, 728 aa, Artificial Sequence; identical to SEQ ID NO: 160
  Synthetic polypeptide

SEQ ID NO: 403 - protein, 733 aa, Artificial Sequence
  Synthetic polypeptide
MAADGHLPDWLEDNLSEGIREWWDLKPGAPKPKANQQKQDDGRGLVLPGYKYLGPFNGLDKGEPVNAADAAALEHDKAYDQQLKAGDNPYLRYNHADAEFQERLQEDTSFGGNLGRAVFQAKKRVLEPLGLVEEGAKTAPGKKRPIESPDSSTGIGKKGQQPAKKKLNFGQTGDSESVPDPQPIGEPPAGPSGLGSGTMAAGGGAPMADNNEGADGVGSSSGNWHCDSTWLGDRVITTSTRTWALPTYNNHLYKQISNGTSGGSTNDNTYFGYSTPWGYFDFNRFHCHFSPRDWQRLINNSWGFRPKRLNFKLFNIQVKEVTQNEGTKTIANNLTSTIQVFTDSEYQLPYVLGSAHQGCLPPFPADVFMIPQYGYLTLNNGSQAVGRSSFYCLEYFPSQMLRTGNNFEFSYQFEDVPFHSSYAHSQSLDRLMNPLIDQYLYYLSRTQSTGGTAGTQQLLFSQAGPNNMSAQAKNWLPGPCYRQQRVSTTLSQNNNSNFAWTGATKYHLNGRDSLVNPGVAMATHKDDEERFFPSSGVLMFGKQGAGKDNVDYSSVMLTSEEEIKTTNPVATEQYGVVADNLQQQNAAPIVGAVNSQGALPGMVWQNRDVYLQGPIWAKIPHTDGNFHPSPLMGGFGLKHPPPQILIKNTPVPADPPTTFSQAKLASFITQYSTGQVSVEIEWELQKENSKRWNPEIQYTSNYYKSTNVDFAVNTEGTYSEPRPIGTRYLTRNL

SEQ ID NO: 404 - DNA, 3113 bp, Artificial Sequence
  Synthetic polynucleotide
gaattcgccctttctacggctgcgtcaactggaccaatgagaactttcccttcaacgattgcgtcgacaagatggtgatctggtgggaggagggcaagatgacggccaaggtcgtggagtccgccaaggccattctcggcggcagcaaggtgcgcgtggaccaaaagtgcaagtcgtccgcccagatcgatcccacccccgtgatcgtcacttccaacaccaacatgtgcgccgtgattgacgggaacagcaccaccttcgagcaccagcagccgttacaagaccggatgttcaaatttgaactcacccgccgtctggagcatgactttggcaaggtgacaaagcaggaagtcaaagagttcttccgctgggcgcaggatcacgtgaccgaggtggcgcatgagttctacgtcagaaagggtggagccaacaagagacccgcccccgatgacgcggataaaagcgagcccaagcgggcctgcccctcagtcgcggatccatcgacgtcagacgcggaaggagctccggtggactttgccgacaggtaccaaaacaaatgttctcgtcacgcgggcatgcttcagatgctgcttccctgcaagacatgcgagagaatgaatcagaatttcagcatttgcttcacgcacgggaccagagactgttcagaatgtttccccggcgtgtcagaatctcaaccggtcgtcagaaagaggacgtatcggaaactctgtgccattcatcatctgctggggcgggctcccgagattgcttgctcggcctgcgatctggtcaacgtggacctggatgactgtgtttctgagcaataaatgacttaaaccaggtatggctgccgatggtcatcttccagattggctcgaggacaacctctctgagggcattcgcgagtggtgggacttgaaacctggagccccgaaacccaaagccaaccagcaaaagcaggacgacggccggggtctggtgcttcctggctacaagtacctcggacccttcaacggactcgacaagggggagcccgtcaacgcggcggacgcagcggccctcgagcacgacaaggcctacgaccagcagctcaaagcgggtgacaatccgtacctgcggtataaccacgccgacgccgagtttcaggagcgtcttcaagaagatacgtcttttgggggcaacctcgggcgagcagtcttccaggccaagaagcgggttctcgaacctctcggtctggttgaggaaggcgctaagacggctcctggaaagaagagacccatagaatcccccgactcctccacgggcatcggcaagaaaggccagcagcccgctaaaaagaagctcaactttgggcagactggcgactcagagtcagtgcccgaccctcaaccaatcggagaaccccccgcaggcccctctggtctgggatctggtacaatggctgcaggcggtggcgctccaatggcagacaataacgaaggcgccgacggagtgggtagttcctcaggaaattggcattgcgattccacatagctgggcgacagagtcatcaccaccagcacccgaacctgggccctccccacctacaacaaccacctctacaagcaaatctccaacgggacatcgggaggaagcaccaacgacaacacctacttcggctacagcaccccctgggggtattttgactttaacagattccactgccacttctcaccacgtgactggcagcgactcatcaacaacagctggggattccggcccaagagactcaacttcaagctcttcaacatccaggtcaaggaggtcacgcagaatgaaggcaccaagaccatcgccaataaccttaccagcacgattcaggtctttacggactcggaataccagctcccgtacgtcctcggctctgcgcaccagggctgcctgcctccgttcccggcggacgtcttcatgattcctcagtacgggtacctgactctgaacaacggcagtcaggccgtgggccgttcctccttctactgcctggagtactttccttctcaaatgctgagaacgggcaacaactttgagttcagctaccagtttgaggacgtgccttttcacagcagctacgcgcacagccaaagcctggaccggctgatgaaccccctcatcgaccagtacctgtactacctgtctcggactcagtccacgggaggtaccgcaggaactcagcagttgctattttctcaggccgggcctaataacatgtcggctcaggccaaaaactggctacccgggccctgctaccggcagcaacgcgtctccacgacactgtcgcaaaataacaacagcaactttgcttggaccggtgccaccaagtatcatctgaatggcagagactctctggtaaatcccggtgtcgctatggcaacgcacaaggacgacgaagagcgattttttccatccagcggagtcttgatgtttgggaaacagggagctggaaaagacaacgtggactatagcagcgttatgctaaccagtgaggaagaaatcaaaaccaccaacccagtggccacagaacagtacggcgtggtggccgataacctgcaacagcaaaacgccgctcctattgtaggggccgtcaacagtcaaggagccttacctggcatggtctggcagaaccgggacgtgtacctgcagggtcctatctgggccaagattcctcacacggacggcaactttcatccttcgccgctgatgggaggctttggactgaaacacccgcctcctcagatcctgattaagaatacacctgttcccgcggatcctccaactaccttcagtcaagccaagctggcgtcgttcatcacgcagtacagcaccggacaggtcagcgtggaaattgaatgggagctgcagaaagagaacagcaagcgctggaacccagagattcagtatacttccaactactacaaatctacaaatgtggactttgctgtcaatactgagggtacttattcagagcctcgccccattggcacccgttacctcacccgtaacctgtaattgcctgttaatcaataaaccggttaattcgtttcagttgaactttggtctctgcgaagggcgaattc

SEQ ID NO: 405 - protein, 731 aa, Artificial Sequence
  Synthetic polypeptide
MAADGYLPDWLEDNLSEGIREWWDLKPGAPKPKANQQKQDDGRGLVLPGYKYLGPFNGLDKGEPVNEADAAALEHDKAYDKQLEQGDNPYLKYNHADAEFQERLQEDTSFGGNLGRAVFRAKKRVLEPLGLVEEGAKTAPGKKRPIESPDSSTGIGKKGQQPAKKKLNFGQTGDSESVPDPQPLGEPPAAPSGLGSGTMAAGGGAPMADNNEGADGVGNASGNWHCDSTWLGDRVITTSTRTWALPTYNNHLYKQISSQSGATNDNHFFGYSTPWGYFDFNRFHCHFSPRDWQRLINNNRGFRPRKLRFKLFNIQVKEVTTNDGVTTIANNLTSTIQVFSDSEYQLPYVLGSAHQGCLPPFPADVFMIPQYGYLTLNNGSQSVGRSSFYCLEYFPSQMLRTGNNFEFSYQFEDVPFHSSYAHSQSLDRLMNPLIDQYLYYLSRTQSTGGTAGTQQLLFSQAGPNNMSAQAKNWLPGPCYRQQRVSTTLSQNNNSNFAWTGATKYHLNGRDSLVNPGVAMATHKDDEERFFPSSGVLMFGKQGAGKDNVDYSSVMLTSEEEIKTTNPVATEQYGVVADNLQQQNAAPIVGAVNSQGALPGMAWQNRDVYLQGPIWAKIPHTDGNFHPSPLMGGFGLKHPPPQILIKNTPVPADPPTTFSQAKLASFITQYSTGQVSVEIEWELQKENSKRWNPEIQYTSNYYKSTNVDFAVNTEGTYSEPRPIGTRYLTRNL

SEQ ID NO: 406 - DNA, 3106 bp, Artificial Sequence
  Synthetic polynucleotide
gaattcgcccttctacggctgcgtcaactggaccaatgagaactttcccttcaacgattgcgtcgacaagatggtgatctggtgggaggagggcaagatgacggccaaggtcgtggagtccgccaaggccattctcggcggcagcaaggtgcgcgtggaccaaaagtgcaagtcgtccgcccagatcgaccccacccccgtgatcgtcacctccaacaccaacatgtgcgccgtgattgacgggaacagcaccaccttcgagcaccagcagccgttgcaggaccggatgttcaaatttgaactcacccgccgtctggagcatgactttggcaaggcgacaaagcaggaagtcaaagagttcttccgctgggcgcaggatcacgtgaccgaggtggcgcatgagttctacgtcagaaagggtggagccaacaagagacccgcccccgatgacgcggataaaagcgagcccaagcgggcccgcccctcagtcgcggatccatcgacgtcagacgcggaaggagctccggtggactttgccgacaggtaccaaaacaaatgttctcgtcacgcgggcatgcttcagatgctgtttccctgcaaaacatgcgagagaatgaatcagaatttcaacatttgcttcacgcacgggaccagagactgttcagaatgtttccccggcgtgtcagaatctcaaccggtcgtcagaaagaggacgtatcggaaactctgtgccattcatcatctgctggggcgggctcccgagattgcttgctcggcctgcgatctggtcaacgtggacctggatgactgtgtttctgagcaataaatgacttaaaccaggtatggctgccgatggttatcttccagattggctcgaggacaacctctctgagggcattcgcgagtggtgggacttgaaacctggagccccgaaacccaaagccaaccagcaaaagcaggacgacggccggggtctggtgcttcctggctacaagtacctcggacccttcaacggactcgacaagggagagccggtcaacgaggcagacgccgcggccctcgagcacgacaaggcctacgacaagcagctcgagcagggggacaacccgtacctcaagtacaaccacgccgacgccgagtttcaggagcgtcttcaagaagatacgtcttttgggggcaacctcgggcgagcagtcttccgggccaagaagcgggttctcgaacctctcggtctggttgaggaaggcgctaagacggctcctggaaagaagagacccatagaatcccccgactcctccacgggcatcggcaagaaaggccagcagcccgctaaaaagaagctcaactttgggcagactggcgactcagagtcagtgcccgacccccaacctctcggagaacctcccgccgcgccctcaggtctgggatctggtacaatggctgcaggcggtggcgcaccaatggcagacaataacgaaggcgccgacggagtgggtaatgcctccggaaattggcattgcgattccacatggctgggcgacagagtcatcaccaccagcacccgcacctgggccctgcccacctacaacaaccacctctacaagcagatatcaagtcagagcggggctaccaacgacaaccacttcttcggctacagcaccccctggggctattttgacttcaacagattccactgccacttctcaccacgtgactggcagcgactcatcaacaacaaccggggattccggcccagaaagctgcggttcaagttgttcaacatccaggtcaaggaggtcacgacgaacgacggcgttacgaccatcgctaataaccttaccagcacgattcaggtcttctcggactcggagtaccaactgccgtacgtcctcggctctgcgcaccagggctgcctccctccgttccctgcggacgtgttcatgattcctcagtacggatatctgactctaaacaacggcagtcagtctgtgggacgttcctccttctactgcctggagtactttccttctcagatgctgagaacgggcaataactttgaattcagctaccagtttgaggacgtgccctttcacagcagctacgcgcacagccaaagcctggaccggctgatgaaccccctcatcgaccagtacctgtactacctgtctcggactcagtccacgggaggtaccgcaggaactcagcagttgctattttctcaggccgggcctaataacatgtcggctcaggccaaaaactggctacccgggccctgctaccggcagcaacgcgtctccacgacactgtcgcaaaataacaacagcaactttgcttggaccggtgccaccaagtatcatctgaatggcagagactctctggtaaatcccggtgtcgctatggcaacgcacaaggacgacgaagagcgattttttccatccagcggagtcttgatgtttgggaaacagggagctggaaaagacaacgtggactatagcagcgttatgctaaccagtgaggaagaaatcaaaaccaccaacccagtggccacagaacagtacggcgtggtggccgataacctgcaacagcaaaacgccgctcctattgtaggggccgtcaacagtcaaggagccttacctggcatggcctggcagaaccgggacgtgtacctgcagggtcctatctgggccaagattcctcacacggacggcaactttcatccttcgccgctgatgggaggctttggactgaaacacccgcctcctcagatcctgattaagaatacacctgttcccgcggatcctccaactaccttcagtcaagccaagctggcgtcgttcatcacgcagtacagcaccggacaggtcagcgtggaaattgaatgggagctgcagaaagagaacagcaagcgctggaacccagagattcagtatacttccaactactacaaatctacaaatgtggactttgctgtcaatactgagggtacttattcagagcctcgccccattggcacccgttacctcacccgtaacctgtaattgcctgttaatcaataaaccggttaattcgtttcagttgaactttggtctctgcgaagggcgaattc

SEQ ID NO: 407 - protein, 738 aa, Artificial Sequence
  Synthetic polypeptide
MAADGYLPDWLEDNLSEGIREWWDLKPGAPKPKANQQKQDDGRGLVLPGYKYLGPFNGLDKGEPVNEADAAALEHDKAYDKQLEQGDNPYLKYNHADAEFQERLQEDTSFGGNLGRAVFQAKKRVLEPLGLVEEGAKTAPGKKRPVEPSPQRSPDSSTGIGKTGQQPAKKRLNFGQTGDSESVPDPQPIGEPPAGPSGLGSGTMAAGGGAPMADNNEGADGVGSSSGNWHCDSTWLGDRVITTSTRTWALPTYNNHLYKQISNGTSGGSTNDNTYFGYSTPWGYFDFNRFHCHFSPRDWQRLINNNWGFRPKRLNFKLFNIQVKEVTQNEGTKTIANNLTSTIQVFTDSEYQLPYVLGSAHQGCLPPFPADVFMIPQYGYLTLNNGSQAVGRSSFYCLEYFPSQMLRTGNNFEFSYQFEDVPFHSSYAHSQSLDRLMNPLIDQYLYYLSRTQSTGGTAGTQQLLFSQAGPNNMSAQAKNWLPGPCYRQQRVSTTLSQNNNSNFAWTGATKYHLNGRDSLVNPGVAMATHKDDEERFFPSSGVLMFGKQGAGKDNVDYSSVMLTSEEEIKTTNPVATEQYGVVADNLQQQNAAPIVGAVNSQGALPGMVWQNRDVYLQGPIWAKIPHTDGNFHPSPLMGGFGLKHPPPQILIKNTPVPADPPTTFSQAKLASFITQYSTGQVSVEIEWELQKENSKRWNPEIQYTSNYYKSTNVDFAVNTEGTYSEPRPIGTRYLTRNL

SEQ ID NO: 408 - DNA, 3197 bp, Artificial Sequence
  Synthetic polynucleotide
gaattcgccctttctacggctgcgtcaactggaccaatgagaactttcccttcaacgattgcgtcgacaagatggtgatctggtgggaggagggcaagatgacggccaaggtcgtggagtccgccaaggccattctcggcggcagcaaggtgcgcgtggaccaaaagtgcaagtcgtccgcccagatcgaccccacccccgtgatcgtcacctccaacaccaacatgtgcgccgtgattgacgggaacagcaccaccttcgagcaccagcagccgttacaagaccggatgttcaaatttgaactcacccgccgtctggagcacgactttggcaaggtgacaaagcaggaagtcaaagagttcttccgctgggcgcaggatcacgtgaccgaggtggcgcatgagttctacgtcagaaagggtggagccaacaagagacccgcccccgatgacgcggataaaagcgagcccaagcgggcctgcccctcagtcgcggatccatcgacgtcagacgcggaaggagctccggtggactttgccgacaggtaccaaaacaaatgttctcgtcacgcgggcatgcttcagatgctgtttccctgcaagacatgcgagagaatgaatcagaatttcaacatttgcttcacgcacgggaccagagactgttcagaatgtttccccggcgtgtcagaatctcaaccggtcgtcagaaagaggacgtatcggaaactctgtgccattcatcatctgctggggcgggctcccgagattgcttgctcggcctgcgatctggtcaacgtggacctggatgactgtgtttctgagcaataaatgacttaaaccaggtatggctgccgatggttatcttccagattggctcgaggacaacctctctgagggcattcgcgagtggtgggacttgaaacctggagccccgaaacccaaagccaaccagcaaaagcaggacgacggccggggtctggtgcttcctggctacaagtacctcggacccttcaacggactcgacaagggagagccggtcaacgaggcagacgccgcggccctcgagcacgacaaggcctacgacaagcagctcgagcagggggacaacccgtacctcaagtacaaccacgccgacgccgagtttcaggagcgtcttcaagaagatacgtcttttgggggcaacctcgggcgagcagtcttccaggccaagaagcgggttctcgaacctctcggtctggttgaggaaggcgctaagacggctcctggaaagaagagaccggtagagccatcaccccagcgttctccagactcctctacgggcatcggcaagacaggccagcagcccgcgaaaaagagactcaactttgggcagactggcgactcagagtcagtgcccgaccctcaaccaatcggagaaccccccgcaggcccctctggtctgggatctggtacaatggctgcaggcggtggcgctccaatggcagacaataacgaaggcgccgacggagtgggtagttcctcaggaaattggcattgcgattccacatggctgggcgacagagtcatcaccaccagcacccgaacctgggccctccccacctacaacaaccacctctacaagcaaatctccaacgggacatcgggaggaagcaccaacgacaacacctacttcggctacagcaccccctgggggtattttgactttaacagattccactgccacttctcaccacgtgactggcagcgactcatcaacaacaactggggattccggcccaagagactcaacttcaagctcttcaacatccaggtcaaggaggtcacgcagaatgaaggcaccaagaccatcgccaataaccttaccagcacgattcaggtctttacggactcggaataccagctcccgtacgtcctcggctctgcgcaccagggctgcctgcctccgttcccggcggacgtcttcatgattcctcagtacgggtacctgactctgaacaacggcagtcaggccgtgggccgttcctccttctactgcctggagtactttccttctcaaatgctgagaacgggcaacaactttgagttcagctaccagtttgaggacgtgccttttcacagcagctacgcgcacagccaaagcctggaccggctgatgaaccccctcatcgaccagtacctgtactacctgtctcggactcagtccacgggaggtaccgcaggaactcagcagttgctattttctcaggccgggcctaataacatgtcggctcaggccaaaaactggctacccgggccctgctaccggcagcaacgcgtctccacgacactgtcgcaaaataacaacagcaactttgcttggaccggtgccaccaagtatcatctgaatggcagagactctctggtaaatcccggtgtcgctatggcaacgcacaaggacgacgaagagcgattttttccatccagcggagtcttgatgtttgggaaacagggagctggaaaagacaacgtggactatagcagcgttatgctaaccagtgaggaagaaatcaaaaccaccaacccagtggccacagaacagtacggcgtggtggccgataacctgcaacagcaaaacgccgctcctattgtaggggccgtcaacagtcaaggagccttacctggcatggtctggcagaaccgggacgtgtacctgcagggtcctatctgggccaagattcctcacacggacggcaactttcatccttcgccgctgatgggaggctttggactgaaacacccgcctcctcagatcctgattaagaatacacctgttcccgcggatcctccaactaccttcagtcaagccaagctggcgtcgttcatcacgcagtacagcaccggacaggtcagcgtggaaattgaatgggagctgcagaaagagaacagcaagcgctggaacccagagattcagtatacttccaactactacaaatctacaaatgtggactttgctgtcaatactgagggtacttattcagagcctcgccccattggcacccgttacctcacccgtaacctgtaattgcctgttaatcaataaaccggttaattcgtttcagttgaactttggtctctgcgaagggcgaattcgtttaaacctgcaggactagtccctttagtgagggttaattctgagcttggcgtaatcatgggtcatag

SEQ ID NO: 409 - protein, 735 aa, Artificial Sequence
  Synthetic polypeptide
MAADGYLPDWLEDNLSEGIREWWDLKPGAPKPKANQQKQDDGRGLVLPGYKYLGPFNGLDKGEPVNEADAAALEHDKAYDKQLEQGDNPYLKYNHADAEFQERLQEDTSFGGNLGRAVFQAKKRVLEPLGLVEEGAKTAPGKKRPVEPSPQRSPDSSTGIGKTGQQPAKKRLNFGQTGDSESVPDPQPIGEPPAGPSGLGSGTMAAGGGAPMADNNEGADGVGSSSGNWHCDSTWLGDRVITTSTRTWALPTYNNHLYKQISNGTSGGSTNDNTYFGYSTPWGYFDFNRFHCHFSPRDWQRLINNNWGFRPRKLRFKLFNIQVKEVTTDDGVTTIANNLTSTIQVFSDSEYQLPYVLGSAHQGCLPPFPADVFMIPQYGYLTLNNGSQSVGRSSFYCLEYFPSQMLRTGNNFEFSYTFEEVPFHSSYAHSQSLDRLMNPLIDQYLYYLARTQSTTGSTRELQFHQAGPNTMAEQSKNWLPGPCYRQQRLSKNIDSNNNSNFAWTGATKYHLNGRNSLTNPGVAMATNKDDEDQFFPINGVLVFGKTGAANKTTLENVLMTSEEEIKTTNPVATEEYGVVSSNLQSSTAGPQTQTVNSQGALPGMVWQNRDVYLQGPIWAKIPHTDGNFHPSPLMDGFGLKHPPPQILIKNTPVPANPPEVFTPAKFASFITQYSTGQVSVEIEWELQKENSKRWNPEIQYTSNYAKSNNVEFAVNNEGVYTEPRPIGTRYLTRNL

SEQ ID NO: 410 - DNA, 3276 bp, Artificial Sequence
  Synthetic polynucleotide
gaattcgcccttcgcagagaccaaagttcaactgaaacgaattaaccggtttattgattaacaggcaattacaggttacgggtgaggtaacgggtgccaatggggcgaggctcagtataaaccccttcgttgttgacagcaaattccacattattagacttggcataatttgaggtgtactgaatctctggattccagcgtttgctgttttctttctgcagttcccactcgatctccacgctgacctggccggtgctgtactgcgtgataaatgaggcaaacttggcaggagtaaacacctctggaggattagcaggtaccggggtgtttttgatgagaatttgaggaggcgggtgtttgagtccaaatccgtccatcaggggagacgggtgaaagttgccgtccgtgtgaggaattttggcccagatgggaccctgcaggtacacgtcccggttctgccagaccatgccgggcagagccccctggctgttgacagtctgtgtctggggtccggccgtagacgattgcaggttgctggagaccacaccgtattcttctgtagccacgggattggtggttttgatctcctcctcgctggtcattagcacgttttccagcgttgtcttgttggcagcccccgttttgccaaaaaccagcactccgttgatgggaaagaactggtcctcgtcgtccttgttggtggccatggctacgcccgggttggttaatgaatttctaccattcagatggtatttagtggccccggtccaggcaaagttactgttgttgttgctgtctatgttttttgacagtctctgctgccgataacagggtccgggcagccagttctttgattgctcggccatggtgttgggcccagcctgatggaactgcagctcccttgtggaccccgtagtgctctgggtccgggccaggtagtacaggtactggtcgatgaggggattcatcagccggtccaggctctggctatgcgcatagctgctgtggaaaggcacttcctcaaaggtgtagctgaattcaaagttattgcccgttctcagcatctgagaaggaaagtactccaggcagtagaaggaggaacgtcccacagactgactgccgttgtttagagtcagatatccgtactgaggaatcatgaacacgtccgcagggaacggagggaggcagccctggtgcgcagagccgaggacgtacggcagttggtactccgagtccgagaagacctgaatcgtgctggtaaggttattagcgatggtcgtaacgccgtcgtccgtcgtgacctccttgacctggatgttgaacaacttgaaccgcagctttctgggccggaatccccagttgttgttgatgagtcgctgccagtcacgtggtgagaagtggcagtggaatctgttaaagtcaaaatacccccagggggtgctgtagccgaagtaggtgttgtcgttggtgcttcctcccgatgtcccgttggagatttgcttgtagaggtggttgttgtaggtggggagggcccaggttcgggtgctggtggtgatgactctgtcgcccagccatgtggaatcgcaatgccaatttcctgaggaactacccactccgtcggcgccttcgttattgtctgccattggagcgccaccgcctgcagccattgtaccagatcccagaccagaggggcctgcggggggttctccgattggttgagggtcgggcactgactctgagtcgccagtctgcccaaagttgagtctctttttcgcgggctgctggcctgtcttgccgatgcccgtagaggagtctggagaacgctggggtgatggctctaccggtctcttctttccaggagccgtcttagcgccttcctcaaccagaccgagaggttcgagaacccgcttcttggcctggaagactgctcgcccgaggttgcccccaaaagacgtatcttcttgaagacgctcctgaaactcggcgtcggcgtggttgtacttgaggtacgggttgtccccctgctcgagctgcttgtcgtaggccttgtcgtgctcgagggccgcggcgtctgcctcgttgaccggctctcccttgtcgagtccgttgaagggtccgaggtacttgtagccaggaagcaccagaccccggccgtcgtcctgcttttgctggttggctttgggtttcggggctccaggtttcaagtcccaccactcgcgaatgccctcagagaggttgtcctcgagccaatctggaagataaccatcggcagccatacctggtttaagtcatttattgctcagaaacacagtcatccaggtccacgttgaccagatcgcaggccgagcaagcaatctcgggagcccgccccagcagatgatgaatggcacagagtttccgatacgtcctctttctgacgaccggttgagattctgacacgccggggaaacattctgaacagtctctggtcccgtgcgtgaagcaaatgttgaaattctgattcattctctcgcatgtcttgcagggaaacagcatctgaagcatgcccgcgtgacgagaacacttgttttggtacctgtcggcaaagtccaccggagctccttccgcgtctgacgtcgatggatgcaaaatgtcgcaaaagcactcacgtgacagctaatacaggaccactcccctatgacgtgatttacgtcagcgctatgcccgcgtgacgagaacatttgttttggtacctgtcggcaaagtccaccggagctccttccgcgtctgacgtcgatggatccgcgactgaggggcaggcccgcttgggctcgcttttatccgcgtcatcgggggcgggtctcttgttggctccaccctttctgacgtagaactcatgcgccacctcggtcacgtgatcctgcgcccagcggaagaactctttgacttcctgctttgtcaccttgccaaagtcatgctccagacggcgggtgagttcaaatttgaacatccggtcctgcaacggctgctggtgctcgaaggtggtgctgttcccgtcaatcacggcgcacatgttggtgttggaagtgacgatcacgggggtgggatcgatctgggcggaagacttgcacttttggtccacgcgcaccttgctgccgccgagaatggccttggcggactccacgaccttggccgtcatcttgccctcctcccaccagatcaccatcttgtcgacgcaatcgttgaagggaaagttctcattggtccagttgacgcagccgtagaaagggcgaattc

SEQ ID NO: 411 - protein, 738 aa, Artificial Sequence; identical to SEQ ID NO: 76
  Synthetic polypeptide

SEQ ID NO: 412 - protein, 738 aa, Artificial Sequence
  Synthetic polypeptide
MAADGYLPDWLEDNLSEGIREWWDLKPGAPKPKANQQKQDDGRGLVLPGYKYLGPFNGLDKGEPVNAADAAALEHDKAYDQQLKAGDNPYLRYNHADAEFQERLQEDTSFGGNLGRAVFQAKKRVLEPLGLVEEGAKTAPGKKRPVEPSPQRSPDSSTGIGKKGHQPARKRLNFGQTGDSESVPDPQPIGEPPAGPSGLGSGTMAAGGGAPMADNNEGADGVGSSSGNWHCDSTWLGDRVITTSTRTWALPTYNNHLYKQISNGTSGGSTNDNTYFGYSTPWGYFDFNRFHCHFSPRDWQRLINNNWGFRPKRLNFKLFNIQVKEVTQNEGTKTIANNLTSTIQVFTDSEYQLPYVPGSAHQGCLPPFPADVFMIPQYGYLTLNNGSQAVGRSSFYCLEYFPSQMLRTGNNFEFSYTFEDVPFHSSYAHSQSLDRLMNPLIDQYLYYLSRTQSTGGTQGTQQLLFSQAGPANMSAQAKNWLPGPCYRQQRVSTTLSQNNNSNFAWTGATKYHLNGRDSLVNPGVAMATHKDDEERFFPSSGVLMFGKQGAGKDNVDYSSVMLTSEEEIKTTNPVATEQYGVVADNLQQTNGAPIVGTVNSQGALPGMVWQNRDVYLQGPIWAKIPHTDGNFHPSPLMGGFGLKHPPPQILIKNTPVPADPPTTFSQAKLASFITQYSTGQVSVEIEWELQKENSKRWNPEIQYTSNYYKSTNVDFAVNTEGTYSEPRPIGTRYLTRNL

SEQ ID NO: 413 - protein, 738 aa, Artificial Sequence; identical to SEQ ID NO: 74
  Synthetic polypeptide

SEQ ID NO: 414 - protein, 728 aa, Artificial Sequence
  Synthetic polypeptide
MAADGYLPDWLEDNLSEGIREWWDLKPGAPKPKANQQKQDDGRGLVLPGYKYLGPFNGLDKGEPVNEADAAALEHDKAYDKQLEQGDNPYLKYNHADAEFQERLQEDTSFGGNLGRAVFQAKKRVLEPLGLVEEGAKTAPGKKRPIESPDSSTGIGRKGQQPAKKKLNFGQTGDSESVPDPQPIGEPPAGPSGLGSGTMAAGGGAPMADNNEGADGVGNASGNWHCDSTWLGDRVITTSTRTWALPTYNNHLYKQISSQSGATNDNHFFGYSTPWGYFDFNRFHCHFSPRDWQRLINNNWGFRPRKLRFKLFNIQVKEVTTNDGVTTIANNLTSTIQVFSDSEYQLPYVLGSAHQGCLPPFPADVFMIPQYGYLTLNNGSQSVGRSSFYCLEYFPSQMLRTGNNFEFSYTFEEVPFHSSYAHSQSLDRLMNPLIDQYLYYLARTQSTTGSTRELQFHQAGPNTMAEQSKNWLPGPCYRQQRLSKNIDSNNNSNFAWTGATKYHLNGRNSLTNPGVAMATNKDDEDQFFPINGVLVFGKTGAANKTTLENVLMTSEEEIKTTNPVATEEYGVVSSNLQSSTAGPQTQTVNSQGALPGMVWQNRDVYLQGPIWAKIPHTDGNFHPSPLMGGFGLKHPPPQILIKNTPVPANPPEVFTPAKFASFITQYSTGQVSVEIEWELQKENSKRWNPEIQYTSNYAKSNNVEFAVNNEGVYTEPRPIGTRYLTRNL

SEQ ID NO: 415 - DNA, 2489 bp, Artificial Sequence
  Synthetic polynucleotide
gaattcgccctttctacggctgcgtcaactggaccaatgagaactttcccttcaacgattgcgtcgacaagatggtgatctggtgggaggagggcaagatgacggccaaggtcgtgaagtccgccaaggccattcatcatctgctggggcgggctcccgagattgcttgctcggcctgcgatctggtcaacgtggacctggatgactgtgtttctgagcaataaatgacttaaaccaggtatggctgccgatggttatcttccagattggctcgaggacaacctctctgagggcattcgcgagtggtgggacttgaaacctggagccccgaaacccaaagccaaccagcaaaagcaggacgacggccggggtctggtgcttcctggctacaagtacctcggacccttcaacggactcgacaagggagagccggtcaacgaggcagacgccgcggccctcgagcacgacaaggcctacgacaagcagctcgagcagggggacaacccgtacctcaagtacaaccacgccgacgccgagtttcaggagcgtcttcaagaagatacgtcttttgggggcaacctcgggcgagcagtcttccaggccaagaagcgggttctcgaacctctcggtctggttgaggaaggcgctaagacggctcctggaaagaagagacccatagaatcccccgactcctccacgggcatcggcaggaaaggccagcagcccgctaaaaagaagctcaactttgggcagactggcgactcagagtcagtgcccgaccctcaaccaatcggagaaccccccgcaggcccctctggtctgggatctggtacaatggctgcaggcggtggcgctccaatggcagacaataacgaaggcgccgacggagtgggtaatgcctccggaaattggcattgcgattccacatggctgggcgacagagtcatcaccaccagcacccgcacctgggccctgcccacctacaacaaccacctctacaagcagatatcaagtcagagcggggctaccaacgacaaccacttcttcggctacagcaccccctggggctattttgacttcaacagattccactgccacttctcaccacgtgactggcagcgactcatcaacaacaactggggattccggcccagaaagctgcggttcaagttgttcaacatccaggtcaaggaggtcacgacgaacgacggcgttacgaccatcgccaataaccttaccagcacgattcaggtcttctcggactcggagtaccaactgccgtacgtcctcggctctgcgcaccagggctgcctccctccgttccctgcggacgtgttcatgattcctcagtacggatatctgactctaaacaacggcagtcagtctgtgggacgttcctccttctactgcctggagtactttccttctcagatgctgagaacgggcaataactttgaattcagctacacctttgaggaagtgcctttccacagcagctatgcgcacagccagagcctggaccggctgatgaatcccctcatcgaccagtacctgtactacctggcccggacccagagcactacggggtccacaagggagctgcagttccatcaggctgggcccaacaccatggccgagcaatcaaagaactggctgcccggaccctgttatcggcagcagagactgtcaaaaaacatagacagcaacaacaacagtaactttgcctggaccggggccactaaataccatctgaatggtagaaattcattaaccaacccgggcgtagccatggccaccaacaaggacgacgaggaccagttctttcccatcaacggagtgctggtttttggcaaaacgggggctgccaacaagacaacgctggaaaacgtgctaatgaccagcgaggaggagatcaaaaccaccaatcccgtggctacagaagaatacggtgtggtctccagcaacctgcaatcgtctacggccggaccccagacacagactgtcaacagccagggggctctgcccggcatggtctggcagaaccgggacgtgtacctgcagggtcccatctgggccaaaattcctcacacggacggcaactttcacccgtctcccctgatgggcggatttggactcaaacacccgcctcctcaaattctcatcaaaaacaccccggtacctgctaatcctccagaggtgtttactcctgccaagtttgcctcatttatcacgcagtacagcaccggccaggtcagcgtggagatcgagtgggaactgcagaaagaaaacagcaaacgctggaatccagagattcagtacacctcaaattatgccaagtctaataatgtggaatttgctgtcaacaacgaaggggtttatactgagcctcgccccattggcacccgttacctcacccgtaacctgtaattgcctgttaatcaataaaccggttaattcgtttcagttgaactttggtcaagggcgaattc

SEQ ID NO: 416 - protein, 728 aa, Artificial Sequence
  Synthetic polypeptide
MAADGYLPDWLEDNLSEGIREWWDLKPGAPKPKANQQKQDDGRGLVLPGYKYLGPFNGLDKGEPVNAADAAALEHDKAYDQQLKAGDNPYLRYNHADAEFQERLQEDTSFGGNLGRAVFQAKKRVLEPLGLVEEGAKTAPGKKRPIESPDSSTGIGKKGQQPAKKKLNFGQTGDSESVPDPQPIGEPPAGPSGLGSGTMAAGGGAPMADNNEGADGVGNASGNWHCDSTWLGDRVITTSTRTWALPTYNNHLYKQISSQSGATNDNHFFGYSTPWGYFDFNRFHCHFSPRDWQRLINNNWGFRPRKLRFKLFNIQVKEVTTNDGVTTIANNLTSTIQVFSDSEYQLPYVLGSAHQGCLPPFPADVFMIPQYGYLTLNNGSQSVGRSSFYCLEYFPSQMLRTGNNFEFSYTFEEVPFHSSYAHSQSLDRLMNPLIDQYLYYLARTQSTTGSTRELQFHQAGPNTMAEQSKNWLPGPCYRRQRLSKDIDSNNNSNFAWTGATKYHLNGRNSLTNPGVAMATNKDDEDQFFPINGVLVFGKTGAANKTTLENVLMTSEEEIKTTNPVATEEYGVVSSNLQSSTAGPQTQTVNSQGALPGMVWQNRDVYLQGPIWAKIPHTDGNFHPSPLMGGFGLKHPPPQILIKNTPVPANPPEVFTPAKFASFITQYSTGQVSVEIEWELQKENSKRWNPEIQYTSNYAKSNNVEFAVNNEGVYTEPRPIGTRYLTRNL

SEQ ID NO: 417 - DNA, 3098 bp, Artificial Sequence
  Synthetic polynucleotide
gaattcgccctttctacggctgcgtcaactggaccaatgagaactttcccttcaacgattgcgtcgacaagatggtgatctggtgggaggagggcaagatgacggccaaggtcgtggagtccgccaaggccattctcggcggcagcaaggtgcgcgtggaccaaaagtgcaagtcttccgcccagatcgatcccacccccgtgatcgtcacttccaacaccaacatgtgcgccgtgattgacgggaacagcaccaccttcgagcaccagcagccgttacaagaccggatgttcaaatttgaactcacccgccgtctggagcacgactttggcaaggtgacaaagcaggaagtcaaagagttcttccgctgggcgcaggatcacgtgaccgaggtggcgcatgagttctacgtcagaaagggtggagccaacaagagacccgcccccgatgacgcggataaaagcgagcccaagcgggcctgcccctcagtcgcggatccatcgacgtcagacgcggaaggagctccggtggactttgccgacaggtaccaaaacaaatgttctcgtcacgcgggcatgcttcagatgctgtttccctgcaagacatgcgagagaatgaatcagaatttcaacatttgcttcacgcacgggaccggagactgttcagaatgtttccccggcgtgtcagaatctcaaccggtcgtcagaaagaggacgtatcggaaactctgtgccattcatcatctgctggggcgggctcccgagattgcttgctcggcctgcgatctggtcaacgtggacctggatgactgtgtttctgagcaataaatgacttaaaccaggtatggctgccgatggttatcttccagattggctcgaggacaacctctctgagggcattcgcgagtggtgggacttgaaacctggagccccgaaacccaaagccaaccagcaaaagcaggacgacggccggggtctggtgcttcctggctacaagtacctcggacccttcaacggactcgacaagggagagccggtcaacgcggcggacgcagcggccctcgagcacgacaaggcctacgaccagcagctcaaagcgggtgacaatccgtacctgcggtataaccacgccgacgccgagtttcaggagcgtcttcaagaagatacgtcttttgggggcaacctcgggcgagcagtcttccaggccaagaagcgggttctcgaacctctcggtctggttgaggaaggcgctaagacggctcctggaaagaagagacccatagaatcccccgactcctccacgggcatcggcaagaaaggccagcagcccgctaaaaagaagctcaactttgggcagactggcgactcagagtcagtgcccgaccctcaaccaatcggagaaccccccgcaggcccctctggtctgggatctggtacaatggctgcaggcggtggcgctccaatggcagacaataacgaaggcgccgacggagtgggtaatgcctccggaaattggcattgcgattccacatggctgggcgacagagtcatcaccaccagcacccgcacctgggccctgcccacctacaacaaccacctctacaagcagatatcaagtcagagcggggctaccaacgacaaccacttcttcggctacagcaccccctggggctattttgacttcaacagattccactgccacttctcaccacgtgactggcagcgactcatcaacaacaactggggattccggcccagaaagctgcggttcaagttgttcaacatccaggtcaaggaggtcacgacgaacgacggcgttacgaccatcgctaataaccttaccagcacgattcaggtcttctcggactcggagtaccaactgccgtacgtcctcggctctgcgcaccagggctgcctccctccgttccctgcggacgtgttcatgattcctcagtacggatatctgactctaaacaacggcagtcagtctgtgggacgttcctccttctactgcctggagtactttccttctcagatgctgagaacgggcaataactttgaattcagctacacctttgaggaagtgcctttccacagcagctatgcgcacagccagagcctggaccggctgatgaatcccctcatcgaccagtacctgtactacctggcccggacccagagcactacggggtccacaagggagctgcagttccatcaggctgggcccaacaccatggccgagcaatcaaagaactggctgcccggaccctgttatcggcggcagagactgtcaaaagacatagacagcaacaacaacagtaactttgcctggaccggggccactaaataccatctgaatggtagaaattcattaaccaacccgggcgtagccatggccaccaacaaggacgacgaggaccagttctttcccatcaacggagtgctggtttttggcaaaacgggggctgccaacaagacaacgctggaaaacgtgctaatgaccagcgaggaggagatcaaaaccaccaatcccgtggctacagaagaatacggtgtggtctccagcaacctgcaatcgtctacggccggaccccagacacagactgtcaacagccagggggctctgcccggcatggtctggcagaaccgggacgtgtacctgcagggtcccatctgggccaaaattcctcacacggacggcaactttcacccgtctcccctgatgggcggatttggactcaaacacccgcctcctcaaattctcatcaaaaacaccccggtacctgctaatcctccagaggtgtttactcctgccaagtttgcctcatttatcacgcagtacagcaccggccaggtcagcgtggagatcgagtgggaactgcagaaagagaacagcaaacgctggaatccagagattcagtacacctcaaattatgccaagtctaataatgtggaatttgctgtcaacaacgaaggggtttatactgagcctcgccccattggcacccgttacctcacccgtaacctgtaattacttgttaatcaataaaccggttgattcgtttcagttgaactttggtctctgcgaagggcgaattc

SEQ ID NO: 418 - protein, 685 aa, Artificial Sequence
  Synthetic polypeptide
MAADGYLPDWLEDNLSEGIREWWDLKPGAPKPKANQQKQDDGRGLVLPGYKYLGPFNGLDKGEPVNEADAAALEHDKAYDKQLEQGDNPYLKYNHADAEFQERLQEDTSFGGNLGRAVFQAKKRVLEPLGLVEEGAKTAPGKKRPVEPSPQRSPDSSTGIGKTGQQPAKKRLNFGQTGDSESVPDPQPIGEPPAGPSGLGSGTMAAGGGAPMADNNEGADGVGSSSGNWHCDSTWLGDRVITTSTRTWALPTYNNHLYKQISNGTSGGSTNDNTYFGYSTPWGYFDFNRFHCHFSPRDWQRLINNNWGFRPKRLNFKLFNIQVKEVTQNEGTKTIANNLTSTIQVFTDSEYQLPYVLGSAHQGCLPPFPADVFMIPQYGYLTLNNGSQAVGRSSFYCLEYFPSQMLRTGNNFEFSYQFEDVPFHSSYAHSQSLDRLTNPLIDQYLYYLARTQSTTGSTRGLQFHQAGPNTMAEQSKNWLPGPCYRQQRLSKNIDSNNNSNFAWTGATKYHLNGRNSLTNPGVAMATNKDDEDQFFPINGVLVFGKTGAANKTTLENVLMTSEEEIKTTNPVATEEYGVVSSNLQSSTAGPQTQTVNSQGALPGMVWQNRDVYLQGPIWAKIPHTDGNFHPSPLMGGFGLKHPPPQILIKYTSNYYKSTNVDFAVNTEGTYSEPRPIGTRYLTRNL

SEQ ID NO: 419 - DNA, 2969 bp, Artificial Sequence
  Synthetic polynucleotide
gaattcgccctttctacggctgcgtcaactggaccaatgagaactttcccttcaacgattgcgtcgacaagatggtgatctggtgggaggagggcaagatgacggccaaggtcgtggagtccgccaaggccattctcggcggcagcaaggtgcgcgtggaccaaaagtgcaagtcgtccgcccagatcgaccccacccccgtgatcgtcacctccaacaccaacatgtgcgccgtgattgacgggaacagcaccaccttcgagcaccagcagccgttacaagaccggatgttcaaatttgaactcacccgccgtctggagcacgactttggcaaggtgacaaagcaggaagtcaaagagttcttccgctgggcgcaggatcacgtgaccgaggtggcgcatgagttctacgtcagaaagggtggagccaacaagagacccgcccccgatgacgcggataaaagcgagcccaagcgggcctgcccctcagtcgcggatccatcgacgtcagacgcggaaggagctccggtggactttgccgacaggtaccaaaacaaatgttctcgtcacgcgggcatgcttcagatgctgtttccctgcaagacatgcgagagaatgaatcagaatttcaacatttgcttcacgcacgggaccagagactgttcagaatgtttccccggcgtgtcagaatctcaaccggtcgtcagaaagaggacgtatcggaaactctgtgccattcatcatctgctggggcgggctcccgagattgcttgctcggcctgcgatctggtcaacgtggacctggatgactgtgtttctgagcaataaatgacttaaaccaggtatggctgccgatggttatcttccagattggctcgaggacaacctctctgagggcatccgcgagtggtgggacttgaaacctggagccccgaaacccaaagccaaccagcaaaagcaggacgacggccggggtctggtgcttcctggctacaagtacctcggacccttcaacggactcgacaagggagagccggtcaacgaggcagacgccgcggccctcgagcacgacaaggcctacgacaagcagctcgagcagggggacaacccgtacctcaagtacaaccacgccgacgccgagtttcaggagcgtcttcaagaagatacgtcttttgggggcaacctcgggcgagcagtcttccaggccaagaagcgggttctcgaacctctcggtctggttgaggaaggcgctaagacggctcctggaaagaagagaccggtagagccatcaccccagcgttctccagactcctctacgggcatcggcaagacaggccagcagcccgcgaaaaagagactcaactttgggcagactggcgactcagagtcagtgcccgaccctcaaccaatcggagaaccccccgcaggcccctctggtctgggatctggtacaatggctgcaggcggtggcgctccaatggcagacaataacgaaggcgccgacggagtgggtagttcctcaggaaattggcattgcgattccacatggctgggcgacagagtcatcaccaccagcacccgaacctgggccctccccacctacaacaaccacctctacaagcaaatctccaacgggacatcgggaggaagcaccaacgacaacacctacttcggctacagcaccccctgggggtattttgactttaacagattccactgccacttctcaccacgtgactggcagcgactcatcaacaacaactggggattccggcccaagagactcaacttcaagctcttcaacatccaggtcaaggaggtcacgcagaatgaaggcaccaagaccatcgccaataaccttaccagcacgattcaggtctttacggactcggaataccagctcccgtacgtcctcggctctgcgcaccagggctgcctgcctccgttcccggcggacgtcttcatgattcctcagtacgggtacctgactctgaacaacggcagtcaggccgtgggccgttcctccttctactgcctggagtactttccttctcaaatgctgagaacgggcaacaactttgagttcagctaccagtttgaggacgtgccttttcacagcagctacgcgcacagccaaagcctggaccggctgacgaaccccctcatcgaccagtacctgtactacctggcccggacccagagcactacggggtccacaagggggctgcagttccatcaggctgggcccaacaccatggccgagcaatcaaagaactggctgcccggaccctgttatcggcagcagagactgtcaaaaaacatagacagcaacaacaacagtaactttgcctggaccggggccactaaataccatctgaatggtagaaattcattaaccaacccgggcgtagccatggccaccaacaaggacgacgaggaccagttctttcccatcaacggagtgctggtttttggcaaaacgggggctgccaacaagacaacgctggaaaacgtgctaatgaccagcgaggaggagatcaaaaccaccaatcccgtggctacagaagaatacggtgtggtctccagcaacctgcaatcgtctacggccggaccccagacacagactgtcaacagccagggggctctgcccggcatggtctggcagaaccgggacgtgtacctgcagggtcccatctgggccaaaattcctcacacggacggcaactttcacccgtctcccctgatgggcggatttggactcaaacacccgcctcctcaaattctcatcaagtatacttccaactactacaaatctacaaatgtggactttgctgtcaatactgagggtacttattcagagcctcgccccattggcacccgttacctcacccgtaacctgtaattgcctgttaatcaataaaccggttaattcgtttcagttgaactttggtctctgcgaagggcgaattc

SEQ ID NO: 420 - protein, 733 aa, Artificial Sequence
  Synthetic polypeptide
MAADGYLPDWLEDNLSEGIREWWDLKPGAPKPKANQQKQDDGRGLVLPGYKYLGPFNGLDKGEPVNAADAAALEHDKAYDQQLKAGDNPYLRYNHADAEFQERLQEDTSFGGNLGRAVFQAKKRVLEPLGLVEEGAKTAPGKKRPIESPDSSTGIGKKGQQPAKKKLNFGQTGDSESVPDPQPIGEPPAGPSGLGSGTMAAGGGAPMADNNEGADGVGSSSGNWHCDSTWLGDRVITTSTRTWALPTYNNHLYKQISNGTSGGSTNDNTYFGYSTPWGYFDFNRFHCHFSPRDWQRLINNNWGFRPKRLNFKLFNIQVKEVTQNEGTKTIANNLTSTIQVFTDSEYQLPYVLGSAHQGCLPPFPADVFMIPQYGYLTLNNGSQAVGRSSFYCLEYFPSQMLRTGNNFEFSYQFEDVPFHSSYAHSQSLDRLMNPLIDQYLYYLSRTQSTGGTAGTQQLLFSQAGPNNMSAQAKNWLPGPCYRQQRVSTTVSQNNNSNFAWTGATKYHLNGRDSLVNPGVAMATHKGDEERFFPSSGVLMFGKQGAGKDNVDYSSVMLTSEEEIKTTNPVATEQYGVVADNLQQQNAAPIVGAVNSQGALPGMVWQNRDVYLQGPIWAKIPHTDGNFHPSPLMGGFGLKHPPPQILIKNTPVPADPPTTFSQAKLASFITQYSTGQVSVEIEWELQKENSKRWNPEIQYTSNYYKSTNVDFAVNTEGTYSEPRPIGTRYLTRSL

SEQ ID NO: 421 - DNA, 3113 bp, Artificial Sequence
  Synthetic polynucleotide
gaattcgccctttctacggctgcgtcaactggaccaatgagaactttcccttcaacgattgcgtcgacaagatggtgatctggtgggaggagggcaagatgacggccaaggtcgtggagtccgccaaggccattctcggcggcagcaaggtgcgcgtggaccaaaagtgcaagtcgtccgcccagatcgatcccacccccgtgatcgtcacttccaacaccaacatgtgcgccgtgattgacgggaacagcaccaccttcgagcaccagcagccgttacaagaccggatgttcaaatttgaactcacccgccgtctggagcatgactttggcaaggtgacaaagcaggaagtcaaagagttcttccgctgggcgcaggatcacgtgaccgaggtggcgcatgagttctacgtcagaaagggtggagccaacaagagacccgcccccgatgacgcggataaaagcgagcccaagcgggcctgcccctcagtcgcggatccatcgacgtcagacgcggaaggagctccggtggactttgccgacaggtaccaaaacaaatgttctcgtcacgcgggcatgcttcagatgctgtttccctgcaagacatgcgagagaatgaatcagaatttcaacatttgcttcacgcacgggaccagagactgttcagaatgtttccccggcgtgtcagaatctcaaccggtcgtcagaaagaggacgtatcggaaactctgtgccattcatcatctgctggggcgggctcccgagattgcttgctcggcctgcgatctggtcaacgtggacctggatgactgtgtttctgagcaataaatgacttaaaccaggtatggctgccgatggttatcttccagattggctcgaggacaacctctctgagggcattcgcgagtggtgggacttgaaacctggagccccgaaacccaaagccaaccagcaaaagcaggacgacggccggggtctggtgcttcctggctacaagtacctcggacccttcaacggactcgacaagggggagcccgtcaacgcggcggacgcagcggccctcgagcacgacaaggcctacgaccagcagctcaaagcgggtgacaatccgtacctgcggtataaccacgccgacgccgagtttcaggagcgtcttcaagaagatacgtcttttgggggcaacctcgggcgagcagtcttccaggccaagaagcgggttctcgaacctctcggtctggttgaggaaggcgctaagacggctcctggaaagaagagacccatagaatcccccgactcctccacgggcatcggcaagaaaggccagcagcccgctaaaaagaagctcaactttgggcagactggcgactcagagtcagtgcccgaccctcaaccaatcggagaaccccccgcaggcccctctggtctgggatctggtacaatggctgcaggcggtggcgctccaatggcagacaataacgaaggcgccgacggagtgggtagttcctcaggaaattggcattgcgattccacatggctgggcgacagagtcatcaccaccagcacccgaacctgggccctccccacctacaacaaccacctctacaagcaaatctccaacgggacatcgggaggaagcaccaacgacaacacctacttcggctacagcaccccctgggggtattttgactttaacagattccactgccacttctcaccacgtgactggcagcgactcatcaacaacaactggggattccggcccaagagactcaacttcaagctcttcaacatccaggtcaaggaggtcacgcagaatgaaggcaccaagaccatcgccaataaccttaccagcacgattcaggtctttacggactcggaataccagctcccgtacgtcctcggctctgcgcaccagggctgcctgcctccgttcccggcggacgtcttcatgattcctcagtacgggtacctgactctgaacaacggcagtcaggccgtgggccgttcctccttctactgcctggagtactttccttctcaaatgctgagaacgggcaacaactttgagttcagctaccagtttgaggacgtgccttttcacagcagctatgcgcacagccaaagcctggaccggctgatgaaccccctcatcgaccagtacctgtactacctgtctcggactcagtccacgggaggtaccgcaggaactcagcagttgctattttctcaggccgggcctaataacatgtcggctcaggccaaaaactggctacccgggccctgctaccggcagcaacgcgtctccacgacagtgtcgcaaaataacaacagcaactttgcttggaccggtgccaccaagtatcatctgaatggcagagactctctggtaaatcccggtgtcgctatggcaacgcacaagggcgacgaagagcgattttttccatccagcggagtcttgatgtttgggaaacagggagctggaaaagacaacgtggactatagcagcgttatgctaaccagtgaggaagaaatcaaaaccaccaacccagtggccacagaacagtacggcgtggtggccgataacctgcaacagcaaaacgccgctcctattgtaggggccgtcaacagtcaaggagccttacctggcatggtctggcagaaccgggacgtgtacctgcagggtcctatctgggccaagattcctcacacggacggcaactttcatccttcgccgctgatgggaggctttggactgaaacacccgcctcctcagatcctgattaagaatacacctgttcccgcggatcctccaactaccttcagtcaagccaagctggcgtcgttcatcacgcagtacagcaccggacaggtcagcgtggaaattgaatgggagctgcagaaagagaacagcaagcgctggaacccagagattcagtatacttccaactactacaaatctacaaatgtggactttgctgtcaatactgagggtacttattcagagcctcgccccattggcacccgttacctcacccgtagcctgtaattgcctgttaatcaataaaccggttgattcgtttcagttgaactttggtctctgcgaagggcgaattc

SEQ ID NO: 422 - protein, 738 aa, Artificial Sequence
  Synthetic polypeptide
MAADGYLPDWLEDNLSEGIREWWDLKPGAPKPKANQQKQDDGRGLVLPGYKYLGPFNGLDKGEPVNAADAAALEHDKAYDQQLKAGDNPYLRYNHADAEFQERLQEDTSFGGNLGRAVFQAKKRVLEPLGLVEEGAKTAPGKKRPVEPSPQRSPDSSTGIGKTGQQPAKKRLNFGQTGDSESVPDPQPIGEPPAGPSGLGSGTMAAGGGAPMADNNEGADGVGSSSGNWHCDSTWLGDRVITTSTRTWALPTYNNHLYKQISNGTSGGSTNDNTYFGYSTPWGYFDFNRFHCHFSPRDWQRLINNNWGFRPKRLNFKLFNIQVKEVTQNEGTKTIANNLTSTIQVFTDSEYQLPYVLGSAHQGCPPPFPADVFMIPQYGYLTLNNGSQAVGRSSFYCLEYFPSQMRRTGNNFEFSYQFEDVPFHSSYAHSQSLDRLMNPLIDQYLYYLSRTQSTGGTAGTQQLLFSQAGPNNMSAQAKNWLPGPCYRQQRVSTTLSQNNNSNFAWTGATKYHLNGRDSLVNPGVAMATHKDDEERFFPSSGVLMFGKQGAGKDNVDYSSVMLTSEEEIKTTNPVATEQYGVVADNLQQQNAAPIVGAVNSQGALPGMVWQNRDVYLQGPIWAKIPHTDGNFHPSPLMGGFGLKHPPPQILIKNTPVPADPPTTFSQAKLASFITQYSTGQVSVEIEWELQKENSKRWNPEIQYTSNYYKSTNVDFAVNTEGTYSEPRPIGTRYLTRNL

SEQ ID NO: 423 - DNA, 3128 bp, Artificial Sequence
  Synthetic polynucleotide
gaattcgccctttctacggctgcgtcaactggaccaatgagaactttcccttcaacgattgcgtcgacaagatggtgatctggtgggaggagggcaagatgacggccaaggtcgtggagtccgccaaggccattctcggcggcagcaaggtgcgcgtggaccaaaagtgcaagtcgtccgcccagatcgaccccacccccgtgatcgtcacctccaacaccaacatgtgcgccgtgattgacgggaacagcaccaccttcgagcaccagcagccgttgcaggaccggatgttcaaatttgaactcacccgccgtctggagcatgactttggcaaggtgacaaagcaggaagtcaaagagttcttccgctgggcgcaggatcacgtgaccgaggtggcgcatgagttctacgtcagaaagggtggagccaacaagagacccgcccccgatgacgcggataaaagcgagcccaagcgggcctgcccctcagtcgcggatccatcgacgtcagacgcggaaggagctccggtggactttgccgacaggtaccaaaacaaatgttctcgtcacgcgggcatgcttcagatgctgtttccctgcaagacatgcgagagaatgaatcagaatttcaacatttgcttcacgcgcgggaccagagactgttcagaatgtttcccgggcgtgtcagaatctcaaccggtcgtcagaaagaggacgtatcggaaactctgtgccattcatcatctgctggggcgggctcccgagattgcttgctcggcctgcgatctggtcaacgtggacctggatgactgtgtttctgagcaataaatgacttaaaccaggtatggctgccgatggttatcttccagattggctcgaggacaacctctctgagggcattcgcgagtggtgggacttgaaacctggagccccgaaacccaaagccaaccagcaaaagcaggacgacggccggggtctggtgcttcctggctacaagtacctcggacccttcaacggactcgacaagggggagcccgtcaacgcggcggacgcagcggccctcgagcacgacaaggcctacgaccagcagctcaaagcgggtgacaatccgtacctgcggtataaccacgccgacgccgagtttcaggagcgtctgcaagaagatacgtcttttgggggcaacctcgggcgagcagtcttccaggccaagaagcgggttctcgaacctctcggtctggttgaggaaggcgctaagacggctcctggaaagaagagaccggtagagccatcaccccagcgttctccagactcctctacgggcatcggcaagacaggccagcagcccgcgaaaaagagactcaactttgggcagactggcgactcagagtcagtgcccgaccctcaaccaatcggagaaccccccgcaggcccctctggtctgggatctggtacaatggctgcaggcggtggcgctccaatggcagacaataacgaaggcgccgacggagtgggtagttcctcaggaaattggcattgcgattccacatggctgggcgacagagtcatcaccaccagcacccgaacctgggccctccccacctacaacaaccacctctacaagcaaatctccaacgggacatcgggaggaagcaccaacgacaacacctacttcggctacagcaccccctgggggtattttgactttaacagattccactgccacttctcaccacgtgactggcagcgactcatcaacaacaactggggattccggcccaagagactcaacttcaagctcttcaacatccaggtcaaggaggtcacgcagaatgaaggcaccaagaccatcgccaataaccttaccagcacgattcaggtctttacggactcggaataccagctcccgtacgtcctcggctctgcgcaccagggctgcccgcctccgttcccggcggacgtcttcatgattcctcagtacgggtacctgactctgaacaacggcagtcaggccgtgggccgttcctccttctactgcctggagtactttccttctcaaatgcggagaacgggcaacaactttgagttcagctaccagtttgaggacgtgccttttcacagcagctacgcgcatagccaaagcctggaccggctgatgaaccccctcatcgaccagtacctgtactacctgtctcggactcagtccacgggaggtaccgcaggaactcagcagttgctattttctcaggccgggcctaataacatgtcggctcaggccaaaaactggctacccgggccctgctaccggcagcaacgcgtctccacgacactgtcgcaaaataacaacagcaactttgcttggaccggtgccaccaagtatcatctgaatggcagagactctctggtaaatcccggtgtcgctatggcaacgcacaaggacgacgaagagcgattttttccatccagcggagtcttgatgtttgggaaacagggagctggaaaagacaacgtggactatagcagcgttatgctaaccagtgaggaagaaatcaaaaccaccaacccagtggccacagaacagtacggcgtggtggccgataacctgcaacagcaaaacgccgctcctattgtaggggccgtcaacagtcaaggagccttacctggcatggtctggcagaaccgggacgtgtacctgcagggtcctatctgggccaagattcctcacacggacggcaactttcatccttcgccgctgatgggaggctttggactgaaacacccgcctcctcagatcctgattaagaatacacctgttcccgcggatcctccaactaccttcagtcaagccaagctggcgtcgttcatcacgcagtacagcaccggacaggtcagcgtggaaattgaatgggagctgcagaaagagaacagcaagcgctggaacccagagattcagtatacttccaactactacaaatctacaaatgtggactttgctgtcaatactgagggtacttattcagagcctcgccccattggcacccgttacctcacccgtaacctgtaattgcctgttaatcaataaaccggttaattcgtttcagttgaactttggtctctgcgaagggcgaattc

SEQ ID NO: 424 - protein, 738 aa, Artificial Sequence; identical to SEQ ID NO: 412
  Synthetic polypeptide

SEQ ID NO: 425 - DNA, 1933 bp, Artificial Sequence
  Synthetic polynucleotide
  modified_base (1302)..(1302): a, c, t, or g
  misc_feature (1302)..(1302): n is a, c, g, or t
caaggcctacgaccagcagctcaaagcgggtgacaatccgtacctgcggtataaccacgccgacgccgagtttcaggagcgtcttcaagaagatacgtcttttgggggcaacctcgggcgagcagtcttccaggccaaaaagcgggttctcgaacctcttggtctggttgagacgccagctaagacggcacctggaaagaagcgaccggtagactcgccagactccacctcgggcatcggcaagaaaggccagcagcccgcgaaaaagagactcaactttgggcagactggcgactcagagtcagtccccgaccctcaaccaatcggagaaccaccagcaggcccctctggtctgggatctggtacaatggctgcaggcggtggcgcaccaatggctgacaataacgagggcgccgacggagtgggtaatgcctcaggaaattggcattgcgattccacatggctgggcgacagagtcatcaccaccagcacccgaacctgggccctgcccacctacaacaaccacctctacaagcaaatctccagtcagtcagcagggagcaccaacgataacgtctatttcggctacagcaccccctgggggtattttgacttcaacagattccattgccacttctcaccacgtgactggcagcgacttatcaacaacaactggggattccggcccaagaagctcaacttcaagctcttcaacatccaggtcaaggaggtcacgacgaatgacggtgtcacaaccatcgctaataaccttaccagcacggttcaggtcttttcggactcggaatatcaactgccgtacgtcctcggctccgcgcaccagggctgcctgcctccgttcccggcagacgtgttcatgattccgcagtacggatacctgactctgaacaatggcagccaatcggtaggccgttcctccttctactgcctggagtactttccttctcagatgctgagaacgggcaacaacttcacctttagctacaccttcgaggacgtgcctttccacagcagctacgcgcacagccagagtctggaccggctgatgaatcccctcatcgaccagtacctgtactacttggccagaacacagagcaacgcaggaggtactgctggcaatcgggaactgcagttttatcagggcggacctaccaccatggccgaacaagcaaagaactggctgcccggaccttgcttccggcaacagagagtatccaagacgctggatcaaaataacaacagcaactttgcctggactggtgccacaaaataccatttaaatgnaagaaattcattggttaatcccggtgtcgccatggcaacccacaaggacgacgaggaacgcttcttcccttcgagcggagttctaatttttggcaaaactggagcagctaataaaactacattagaaaacgtgctcatgacaaatgaagaagaaattcgtcctaccaacccggtagctaccgaggaatacgggattgtaagcagcaacttgcaggcggctagcaccgcagcccagacacaagttgttaacaaccagggagccttacctggcatggtctggcagaaccgggacgtgtacctgcaaggtcccatttgggccaagattcctcacacggacggcaactttcacccgtctcctctaatgggtggctttggactgaaacacccgcctccccagatcctgatcaaaaacacaccggtacctgctaatcctccagaagtgtttactcctgccaagtttgcttccttcatcacgcagtacagcaccgggcaagtcagcgttgagatcgagtgggagctgcagaaagagaacagcaagcgctggaacccagagattcagtacacctccaactttgacaaacagactggagtggactttgctgttgacagccagggtgtttactctgagcct

SEQ ID NO: 426 - protein, 733 aa, Artificial Sequence
  Synthetic polypeptide
MAADGYLPDWLEDNLSEGIREWWDLKPGAPKPKANQQKQDDGRGLVLPGYKYLGPFNGLDKGEPVNAADAAALEHDKAYDQQLKAGDNPYLRYNHADAEFQERLQEDTSFGGNLGRAVFQAKKRVLEPLGLVEEGAKTAPGKKRPLESPQEPDSSSGIGKKGKQPAKKRLNFEEDTGAGDGPPEGSDTSAMSSDIEMRAAPGGNAVDAGQGSDGVGNASGDWHCDSTWSEGKVTTTSTRTWVLPTYNNHLYLRLGTTSNSNTYNGFSTPWGYFDFNRFHCHFSPRDWQRLINNNWGLRPKAMRVKIFNIQVKEVTTSNGETTVANNLTSTVQIFADSSYELPYVMDAGQEGSLSPFPNDVFMVPQYGYCGIVTGENQNQTDRNAFYCLEYFPSQMLRTGNNFEMAYNFGKVPFHSMYAYSQSPDRLMNPLLDQYLWHLQSTTSGETLNQGNAATTFGKIRSGDFAFYRKNWLPGPCVKQQRLSKTASQNYKIPASGGNALLKYDTHYTLNNRWSNIAPGPPMATAGPSDGDFSNAQLIFPGPSVTGNTTTSANNLLFTSEEEIAATNPRDTDMFGQIADNNQNATTAPITGNVTAMGVLPGMVWQNRDIYYQGPIWAKIPHADGHFHPSPLIGGFGLKHPPPQIFIKNTPVPANPATTFTAARVDSFITQYSTGQVAVQIEWEIEKERSKRWNPEVQFTSNYGNQSSMLWAPDTTGKYTEPRVIGSRYLTNHL

SEQ ID NO: 427 - DNA, 3105 bp, Artificial Sequence
  Synthetic polynucleotide
gaattcgcccttgctgcgtcaactggaccaatgagaactttcccttcaacgattgcgtcgacaagatggtgatctggtgggaggagggcaagatgaccgccaaggtcgtggagtccgccaaggccattctgggcggaagcaaggtgcgcgtggaccaaaagtgcaagtcatcggcccagatcgaccccacgcccgtgatcgtcacctccaacaccaacatgtgcgccgtgatcgacgggaacagcaccaccttcgagcaccagcagccgctgcaggaccgcatgttcaagttcgagctcacccgccgtctggagcacgactttggcaaggtgaccaagcaggaagtcaaagagttcttccgctgggctcaggatcacgtgactgaggtggcgcatgagttctacgtcagaaagggcggagccaccaaaagacccgcccccagtgacgcggatataagcgagcccaagcgggcctgcccctcagttgcggagccatcgacgtcagacgcggaagcaccggtggactttgcggacaggtaccaaaacaaatgttctcgtcacgcgggcatgcttcagatgctgtttccctgcaagacatgcgagagaatgaatcagaatttcaacgtctgcttcacgcacggggtcagagactgctcagagtgcttccccggcgcgtcagaatctcaacccgtcgtcagaaaaaagacgtatcagaaactgtgcgcgattcatcatctgctggggcgggcacccgagattgcgtgttcggcccgcgatctcgtcaacgtggacttggatgactgtgtttctgagcaataaatgacttaaaccaggtatggctgctgacggttatcttccagattggctcgaggacaacctctctgagggcattcgcgagtggtgggacctgaaacctggagcccccaagcccaaggccaaccagcagaagcaggacgacggccggggtctggtgcttcctggctacaagtacctcggacccttcaacggactcgacaagggggagcccgtcaacgcggcggacgcagcggccctcgagcacgacaaggcctacgaccagcagctcaaagcgggtgacaatccgtacctgcggtataaccacgccgacgccgagtttcaggagcgtctgcaagaagatacgtcttttgggggcaacctcgggcgagcagtcttccaggccaagaagagggtactcgaacctctgggcctggttgaagaaggtgctaagacggctcctggaaagaagagaccgttagagtcaccacaagagcccgactcctcctcaggaatcggcaaaaaaggcaaacaaccagccaaaaagagactcaactttgaagaggacactggagccggagacggaccccctgaaggatcagataccagcgccatgtcttcagacattgaaatgcgtgcagcaccgggcggaaatgctgtcgatgcgggacaaggttccgatggagtgggtaatgcctcgggtgattggcattgcgattccacctggtctgagggcaaggtcacaacaacctcgaccagaacctgggtcttgcccacctacaacaaccacttgtacctgcggctcggaacaacatcaaacagcaacacctacaacggattctccaccccctggggatactttgactttaacagattccactgtcacttctcaccacgtgactggcaaagactcatcaacaacaactggggactacgaccaaaagccatgcgcgttaaaatcttcaatatccaagttaaggaggtcacaacgtcgaacggcgagactacggtcgctaataaccttaccagcacggttcagatatttgcggactcgtcgtatgagctcccgtacgtgatggacgctggacaagagggaagtctgtctcctttccccaatgacgtcttcatggtgcctcaatatggctactgtggcattgtgactggcgaaaatcagaaccagacggacagaaatgctttctactgcctggagtattttccttcacaaatgctgagaactggcaataactttgaaatggcttacaactttgggaaggtgccgttccactcaatgtatgcttacagccagagcccggacagactgatgaatcccctcctggaccagtacctgtggcacttacagtcgaccacctctggagagactctgaatcaaggcaatgcagcaaccacatttggaaaaatcaggagtggagactttgccttttacagaaagaactggctgcctgggccttgtgttaaacagcagagactctcaaaaactgccagtcaaaattacaagattcctgccagcgggggcaacgctctgttaaagtatgacacccactataccttaaacaaccgctggagcaacatagcgcctggacctccaatggcaacagctggaccttcagatggggacttcagcaacgcccagctcatcttccctggaccatcagtcaccggaaacacaacaacctcagcaaacaatctgttgtttacatcagaagaagaaattgctgccaccaacccaagagacacggacatgtttggtcagattgctgacaataatcagaatgctacaactgctcccataaccggcaacgtgactgctatgggagtgcttcctggcatggtgtggcaaaacagagacatttactaccaagggccaatttgggccaagatcccacacgcggacggacattttcatccttcaccgctaattggcggttttggactgaaacatccgcctccccagatatttatcaaaaacacccccgtacctgccaatcctgcgacaaccttcactgcagccagagtggactctttcatcacacaatacagcaccggccaggtcgctgttcagattgaatgggaaatcgaaaaggaacgctccaaacgctggaatcctgaagtgcagtttacttcaaactatgggaaccagtcttctatgttgtgggctcccgatacaactgggaagtatacagagccgcgggttattggctctcgttatttgactaatcatttgtaactgcctagttaatcaataaaccgtgtgattcgtttcagttgaactttggtctctgcgaagggcgaattc

SEQ ID NO: 428 - protein, 733 aa, Artificial Sequence
  Synthetic polypeptide
MAADGYLPDWLEDNLSEGIREWWDLKPGAPKPKANQQKQDDGRGLVLPGYKYLGPFNGLDKGEPVNAADAAALEHDKAYDQQLKAGDNPYLRYNHADAEFQERLQEDTSFGGNLGRAVFQAKKRVLEPLGLVEEGAKTAPGKKRPLESPQEPDSSSGIGKKGKQPAKKRLNFEEDTGAGDGPPEGSDTSAMSSDIEMRAAPGGNAVDAGQGSDGVGNASGDWHCDSTWSEGKVTTTSTRTWVLPTYNNHLYLRLGTTSNSNTYNGFSTPWGYFDFNRFHCHFSPRDWQRLINNNWGLRPKAMRVKIFNIQVKEVTTSNGETTVANNLTSTVQIFADSSYELPYVMDAGQEGSLPPFPNDVFMVPQYGYCGIVTGENQNQTDRNAFYCLEYFPSQMLRTGNNFEMAYNFEKVPFHSMYAHSQSLDRLMNPLLDQYLWHLQSTTSGETLNQGNAATTFGKIRSGDFAFYRKNWLPGPCVKQQRFSKTASQNYKIPASGGNALLKYDTHYTLNNRWSNIAPGPPMATAGPSDGDFSNAQLIFPGPSVTGNTTTSANNLLFTSEEEIAATNPRDTDMFGQIADNNQNATTAPITGNVTAMGVLPGMVWQNRDIYYQGPIWAKIPHADGHFHPSPLIGGFGLKHPPPQIFIKNTPVPANPATTFTAARVDSFITQYSTGQVAVQIEWEIEKERSKRWNPEVQFTSNYGNQSSMLWAPDTTGKYTEPRVIGSRYLTNHL

SEQ ID NO: 429 - DNA, 3105 bp, Artificial Sequence
  Synthetic polynucleotide
gaattcgcccttgctgcgtcaactggaccaatgagaactttcccttcaacgattgcgtcgacaagatggtgatctggtgggaggagggcaagatgaccgccaaggtcgtggagtccgccaaggccattctgggcggaagcaaggtgcgcgtggaccaaaagtgcaagtcatcggcccagatcgaccccacgcccgtgatcgtcacctccaacaccaacatgtgcgccgtgatcgacgggaacagcaccaccttcgagcaccagcagccgctgcaggaccgcatgttcaagttcgagctcacccgccgtctggagcacgactttggcaaggtgaccaagcaggaagtcaaagagttcttccgctgggctcaggatcacgtgactgaggtggcgcatgagttctacgtcagaaagggcggagccaccaaaagacccgcccccagtgacgcggatataagcgagcccaagcgggcctgcccctcagttgcggagccatcgacgtcagacgcggaagcaccggtggactttgcggacaggtaccaaaacaaatgttctcgtcacgcgggcatgcttcagatgctgtttccctgcaagacatgcgagagaatgaatcagaatttcaacgtctgcttcacgcacggggtcagagactgctcagagtgcttccccggcgcgtcagaatctcaacccgtcgtcagaaaaaagacgtatcagaaactgtgcgcgattcatcatctgctggggcgggcacccgagattgcgtgttcggcctgcgatctcgtcaacgtggacttggatgactgtgtttctgagcaataaatgacttaaaccaggtatggctgctgacggttatcttccagattggctcgaggacaacctctctgagggcattcgcgagtggtgggacctgaaacctggagcccccaagctcaaggccaaccagcagaagcaggacgacggccggggtctggtgcttcctggctacaagtacctcggacccttccacggactcgacaagggggagcccgtcaacgcggcggacgcagcggccctcgagcacgacaaggcctacgaccagcagctcaaagcgggtgacaatccgtacctgcggtataaccacgccgacgccgagtttcaggagcgtctgcaagaagatacgtcttttgggggcaacctcgggcgagcagtcttccaggccaagaagagggtactcgaaccactgggcctggttgaagaaggtgctaagacggctcctggaaagaagagaccgttagagtcaccacaagagcccgactcctcctcaggaatcggcaaaaaaggcaaacaaccagccaaaaagagactcaactttgaagaggacactggagccggagacggaccccctgaaggatcagataccagcgccatgtcttcagacattgaaatgcgtgcagcaccgggcggaaatgctgtcgatgcgggacaaggttccgatggagtgggtaatgcctcgggtgattggcattgcgattccacctggtctgagggcaaggtcacaacaacctcgaccagaacctgggtcttgcccacctacaacaaccacttgtacctgcggctcggaacaacatcaaacagcaacacctacaacggattctccaccccctggggatactttgactttaacagattccactgtcacttctcaccacgtgactggcaaagactcatcaacaacaactggggactacgaccaaaagccatgcgcgttaaaatcttcaatatccaagttaaggaggtcacaacgtcgaacggcgagactacggtcgctaataaccttaccagcacggttcagatatttgcggactcgtcgtatgagctcccgtacgtgatggacgctggacaagagggaagtctgcctcctttccccaatgacgtcttcatggtgcctcaatatggctactgtggcattgtgactggcgaaaatcagaaccagacggacagaaatgctttctactgcctggagtattttccttcacaaatgctgagaactggcaataactttgaaatggcttacaactttgagaaggtgccgttccactcaatgtatgctcacagccagagcctggacagactgatgaatcccctcctggaccagtacctgtggcacttacagtcgaccacctctggagagactctgaatcaaggcaatgcagcaaccacatttggaaaaatcaggagtggagactttgccttttacagaaagaactggctgcctgggccttgtgttaaacagcagagattctcaaaaactgccagtcaaaattacaagattcctgccagcgggggcaacgctctgttaaagtatgacacccactataccttaaacaaccgctggagcaacatagcgcctggacctccaatggcaacagctggaccttcagatggggacttcagcaacgcccagctcatcttccctggaccatcagtcaccggaaacacaacaacctcagcaaacaatctgttgtttacatcagaaggagaaattgctgccaccaacccaagagacacggacatgtttggtcagattgctgacaataatcagaatgctacaactgctcccataaccggcaacgtgactgctatgggagtgcttcctggcatggtgtggcaaaacagagacatttactaccaagggccaatttgggccaagatcccacacgcggacggacattttcatccttcaccgctaattggcggttttggactgaaacatccgcctccccagatatttatcaaaaacacccccgtacctgccaatcctgcgacaaccttcactgcagccagagtggactctttcatcacacaatacagcaccggccaggtcgctgttcagattgaatgggaaatcgaaaaggaacgctccaaacgccggaatcctgaagtgcagtttacttcaaactatgggaaccagtcttctatgttgtgggctcccgatacaactgggaagtatacagagccgcgggttattggctctcgttatttgactaatcatttgtaactgcctagttaatcaataaaccgtgtgattcgtttcagttgaactttggtctctgcgaagggcgaattc

SEQ ID NO: 430 - protein, 733 aa, Artificial Sequence
  Synthetic polypeptide
MAADGYLPDWLEDNLSEGIREWWDLKPGAPKPKANQQKQDDGRGLVLPGYEYLGPFNGLDKGEPVNAADAAALEHDKAYDQQLKAGDNPYLRYNHADAEFQERLQEDTSFGGNLGRAVFQAKKRVLEPLGLVEEGAKTAPGKKRPLESPQEPDSSSGIGKKGKQPAKKRLNFEEDTGAGDGPPEGSDTSAMSSDIEMRAAPGGNAVDAGQGSDGVGNASGDWHCDSTWSEGKVTTTSTRTWVLPTYNNHLYLRLGTTSNSNTYNGFSTPWGYFDFNRFHCHFSPRDWQRLINNNWGLRPKAMRVKIFNIQVKEVTTSNGETTVANNLTSTVQIFADSSYELPYVMDAGQEGSLPPFPNDVFMVPQYGYCGIVTGENQNQTDRNAFYCLEYFPSQMLRTGNNFETAYNFEKVPFHSMYAHSQSLDGLMNPLLDQYLWHLQSTTSGETLNQGNAATTFGKIRSGDFAFYRKNWLPGPCVKQQRFSKTASQNYKIPASGGNALLKYDTHYTLNNRWSNIAPGPPMATAGPSDGDFSNAQLIFPGPSVTGNTTTSANNLLFTSEEEIAATNPRDTDMFGQIADNNQNATTAPITGNVTAMGVLPGMVWQNRDIYYQGPIWAKIPHADGHFHPSPLIGGFGLKHPPPQIFIKNTPVPAYPATTFTAARVDSFITQYSTGQVAVQIEWEIEKERSKRWNPEVQFTSNCGNQSSMLWAPDTTGKYTEPRVIGSRYLTNHL

SEQ ID NO: 431 - DNA, 3105 bp, Artificial Sequence
  Synthetic polynucleotide
gaattcgcccttcgcagagaccaaagttcaactgaaacgaatcacacggtttattgattaactaggcagttacaaatgattagtcaaataacgagagccaataacccgcggctctgtatacttcccagttgtatcgggagcccacaacatagaagactggttcccacagtttgaagtaaactgcacttcaggattccagcgtttggagcgttccttttcgatttcccattcaatctgaacagcgacctggccggtgctgtattgtgtgatgaaagagtccactctggctgcagtgaaggttgtcgcaggataggcaggtacgggggtgtttttgataaatatctggggaggcggatgtttcagtccaaaaccgccaattagcggtgaaggatgaaaatgtccgtccgcgtgtgggatcttggcccaaattggcccttggtagtaaatgtctctgttttgccacaccatgccaggaagcactcccatagcagtcacgttgccggttatgggagcagttgtagcattctgattattgtcagcaatctgaccaaacatgtccgtgtctcttgggttggtggcagcaatttcttcttctgatgtaaacaacagattgtttgctgaggttgttgtgtttccggtgactgatggtccagggaagatgagctgggcgttgctgaagtccccatctgaaggtccagctgttgccattggaggtccaggcgctatgttgctccagcggttgtttaaggtatagtgggtgtcatactttaacagagcgttgcccccgctggcaggaatcttgtaattttgactggcagtttttgagaatctctgctgtttaacacaaggcccaggcagccagttctttctgtaaaaggcaaagtctccactcctgatttttccaaatgtggttgctgcattgccttgattcagagtctctccagaggtggtcgactgtaagtgccacaggtactggtccaggaggggattcatcagtccgtccaggctctggctgtgagcatacattgagtggaacggcaccttctcaaagttgtaagccgtttcaaagttattgccagttctcagcatttgtgaaggaaaatactccaggcagtagaaagcatttctgtccgtctggttctgattttcgccagtcacaatgccacagtagccatattgaggcaccatgaagacgtcattggggaaaggaggcagacttccctcttgtccagcgtccatcacgtacgggagctcatacgacgagtccgcaaatatctgaaccgtgctggtaaggttattagcgaccgtagtctcgccgttcgacgttgtgacctccttaacttggatattgaagattttaacgcgcatggcttttggtcgtagtccccagttgttgttgatgagtctttgccagtcacgtggtgagaagtgacagtggaatctgttaaagtcaaagtatccccagggggtggagaatccgttgtaggtgttgctgtttgatgttgttccgagccgcaggtacaagtggttgttgtaggtgggcaagacccaggttctggtcgaggttgttgtgaccttgccctcagaccaggtggaatcgcaatgccaatcacccgaggcattacccactccatcggaaccttgtcccgcatcgacagcatttccgcccggtgctgcacgcatttcaatgtctgaagacatggcgctggtatctgatccttcagggggtccgtctccggctccagtgtcctcttcaaagttgagtctctttttggctggttgtttgccttttttgccgattcctgaggaggagtcgggctcttgtggtgactctaacggtctcttctttccaggagccgtcttagcaccttcttcaaccaggcccagaggttcgagtaccctcttcttggcctggaagactgctcgcccgaggttgcccccaaaagacgtatcttcttgcagacgctcctgaaactcggcgtcggcgtggttataccgcaggtacggattgtcacccgctttgagctgctggtcgtaggccttgtcgtgctcgagggccgctgcgtccgccgcgttgacgggctcccccttgtcgagtccgttgaagggtccgaggtactcgtagccaggaagcaccagaccccggccgtcgtcctgcttctgctggttggccttgggcttgggggctccaggtttcaggtcccaccactcgcgaatgccctcagagaggttgtcctcgagccaatctggaagataaccgtcagcagccatacctggtttaagtcatttattgctcagaaacacagtcatccaagtccacgttgacgagatcgcaggccgaacacgcaatctcgggtgcccgccccagcagatgatgaatcgcgcacagtttctgatacgtcttttttctgacgacgggttgagattctgacgcgccggggaagcactctgagcagtctctgaccccgtgcgtgaagcagacgttgaaattctgattcattctctcgcatgtcttgcagggaaacagcatctgaagcatgcccgcgtgacgagaacatttgttttggtacctgtccgcaaggtccaccggtgcttccgcgtctgacgtcgatggctccgcaactgaggggcaggcccgcttgggctcgcttatatccgcgtcactgggggcgggtcttttggtggctccgccctttctgacgtagaactcatgcgccacctcagtcacgtgatcctgagcccagcggaagaactctttgacttcctgcttggtcaccttgccaaagtcgtgctccagacggcgggtgagctcgaacttgaacatgcggtcctgcagcggctgctggtgctcgaaggtggtgctgttcccgtcgatcacggcgcacatgttggtgttggaggtgacgatcacgggcgtggggtcgatctgggccgatgacttgcacttttggtccacgcgcaccttgcttccgcccagaatggccttggcggactccacgaccttggcggtcatcttgccctcctcccaccagatcaccatcttgtcgacgcaatcgttgaagggaaagttctcattggtccagttgacgcagcaagggcgaattc

SEQ ID NO: 432 - protein, 729 aa, Artificial Sequence
  Synthetic polypeptide
MAADGYLPDWLEDNLSEGIREWWDLKPGAPKPKANQQKQDDGRGLVLPGYKYLGPFNGLDKGEPVNAADAAALEHDKAYDQQLKAGDNPYLRYNHADAEFQERLQEDTSFGGNLGRAVFQAKKRVLEPLGLVEEGAKTAPGKKRPIDSPDSSTGIGKKGQQPAKKKLNFGQTGDSESVPDPQPLGEPPAAPSSVGSGTMAAGGGAPMADNNEGADGVGNASGNWHCDSTWLGDRVITTSTRTWALPTYNNHLYKQISSSSSGATNDNHYFGYSTPWGYFDFNRFHCHFSPRDWQRLINNNWGFRPKKLRFKLFNIQVKEVTTNDGVTTIANNLTSTVQVFSDSEYQLPYVLGSAHQGCLPPFPADVFMIPQYGYLTLNNGSQSVGRSSFYCLEYFPSQMLRTGNNFEFSYSFEDVPFHSSYAHSQSLDRLMNPLIDQYLYYLARTQSTTGSTRELQFHQAGPNTMAEQSKNWLPGPCYRQQGLSKNLDFNNNSNFAWTAATKYHLNGRNSLTNPGIPMATNKDDEDQFFPINGVLVFGKTGAANKTTLENVLMTSEEEIKTTNPVATEEYGVVSSNLQPSTAGPQSQTINSQGALPGMVWQNRDVYLQGPIWAKIPHTDGNFHPSPLMGGFGLKHPPPQILIKNTPVPANPPEVFTPAKFASFITQYSTGQVSVEIEWELQKENSKRWNPEIQYTSNYAKSNNVEFAVNPDGVYTEPRPIGTRYLPRNL

SEQ ID NO: 433 - DNA, 3094 bp, Artificial Sequence
  Synthetic polynucleotide
gaattcgcccttgctgcgtcaactggaccaagagaactttcccttcaacgattgcgtcgacaagatggtgatctggtgggaggagggcaagatgacggccaaggtcgtggagtccgccaaagccattctgggcggaagcaaggtgcgcgtcgaccaaaagtgcaagtcctcggcccagatcgatcccacccccgtgatcgtcacctccaacaccaacatgtgcgccgtgatcgacgggaacagcaccaccttcgagcaccagcagccgttgcaggaccggatgttcaaatttgaactcacccgccgtctggaacacgactttggcaaggtgaccaagcaggaagtcaaagagttcttccgctgggctagtgatcacgtgactgaggtgacgcatgagttctacgtcagaaagggcggagccagcaaaagacccgcccccgatgacgcggatataagcgagcccaagcgggcctgtccctcagtcacggacccatcgacgtcagacgcggaaggagctccggtggactttgccgacaggtaccaaaacaaatgttctcgtcacgcgggcatgcttcagatgctgtttccctgcaaaacgtgcgagagaatgaatcagaatttcaacatttgcttcacgcacggggtcagagactgtttagaatgtttccccggcgtgtcagaatctcaaccggtcgtcagaaaaaagacgtatcggaagctgtgtgcgattcatcatctgctggggcgggcacccgagattgcttgctcggcctgcgacctggtcaacgtggacctggacgactgtgtttctgagcaataaatgacttaaaccgggtatggctgccgatggttatcttccagattggctcgaggacaacctctctgagggcattcgcgagtggtgggacctgaaacctggagccccgaaacccaaagccaaccagcaaaagcaggacgacggccggggtctggtgcttcctggctacaagtacctcggacccttcaacggactcgacaagggggagcccgtcaacgcggcggacgcagcggccctcgagcacgacaaggcctacgaccagcagctcaaagcgggtgacaatccgtacctgcggtataaccacgccgacgccgagtttcaggagcgtctgcaagaagatacgtcatttgggggcaacctcgggcgagcagtcttccaggccaagaagcgggttctcgaacctctcggtctggttgaggaaggcgctaagacggctcctggaaagaagagacccatagactctccagactcctccacgggcatcggcaaaaaaggccagcagcccgctaaaaagaagctcaattttggtcagactggcgactcagagtcagtccccgaccctcaacctcttggagaacctccagcagcgccctctagtgtgggatctggtacaatggctgcaggcggtggcgcaccaatggcagacaataacgaaggtgccgacggagtgggtaatgcctcaggaaattggcattgcgattccacatggctgggcgacagagtcatcaccaccagcaccagaacctgggccctccccacctacaacaaccacctctacaagcaaatctccagcagcagctcaggagccaccaatgacaaccactacttcggctacagcaccccctgggggtattttgactttaacagattccactgccacttctcaccacgtgactggcagcgactcatcaacaacaactggggattccggcccaagaagctgcggttcaagctcttcaacatccaggtcaaggaggtcacaacgaatgacggcgtcacgaccatcgctaataaccttaccagcacggttcaggtcttctcggactcggaataccagctgccgtacgtcctcggctctgcgcaccagggctgcctgcctccgttcccggcggacgtcttcatgattcctcagtacggctacctgactctgaacaacggcagccaatcggtgggccgttcctccttctactgcctggaatatttcccctctcaaatgctgagaacgggcaacaactttgagttcagttacagcttcgaggacgtgcctttccacagcagctacgcgcacagccagagcctagaccggctgatgaaccctctcatcgaccagtacctgtactacctggcccggacccagagcaccacgggttccaccagggaactgcaatttcatcaagctgggcccaatactatggccgagcagtcaaagaactggctgcctggaccctgctataggcaacagggactgtcaaagaacttggactttaacaacaacagcaattttgcctggactgctgccactaaatatcatctgaatggcagaaactctttgaccaatcctggcattcccatggcaaccaacaaggatgatgaggaccagttctttcccatcaacggggtactggtttttggcaagacgggagctgccaacaaaactacgctggaaaacgttctgatgaccagcgaggaggagatcaagaccactaaccctgtggctacagaagaatacggtgtggtctccagcaacctgcagccgtctacagccgggcctcaatcacagactatcaacagccagggagcactgcctggcatggtctggcagaaccgggacgtgtatctgcagggtcccatctgggccaaaattcctcacacggatggcaactttcacccgtctcctctgatgggcggttttggactcaaacacccgcctccacagatcctgatcaaaaacacacctgtacctgctaatcctccggaggtgtttactcctgccaagtttgcctccttcatcacgcagtacagcaccggacaagtcagcgtggaaatcgagtgggagctgcagaaagaaaacagcaagcgctggaacccagaaattcagtatacttccaattatgccaagtctaataatgttgaatttgctgtgaaccctgatggtgtttatactgagcctcgccccattggcactcgttacctcccccgtaatctgtaattgcttgttaatcaataaaccggttgattcgtttcagttgaactttggtctctgcgaagggcgaattc

SEQ ID NO: 434 - protein, 1458 aa, Artificial Sequence
  Synthetic polypeptide
MAADGYLPDWLEDNLSEGIREWWDLKPGAPKPKANQQKQDDGRGLVLPGYKYLGPFNGLDKGEPVNAADAAALEHDKAYDQQLKAGDNPYLRYNHADAEFQERLQEDTSFGGNLGRAVFQAKKRVLEPLGLVEEGAKTAPGKKRPIDSPDSSTGIGKKGQQPAKKKLNFGQTGDSESVPDPQPLGEPPAAPSSVGSGTMAAGGGAPTADNNEGADGVGNASGNWHCDSTWLGDRVITTSTRTWALPTYNNHLYKQISSSSSGATNDNHYFGYSTPWGYFDFNRFHCHFSPRDWQRLINNNWGFRPKKLRFKLFNIQVKEVTTNDGVTTIANNLTSTVQVFSDSEYQLPYVLGSAHQGCLPPFPADVFMIPQYGYLTLNNGSQSVGRSSFYCLEYFPSQMLRTGNNFEFSYSFEDVPFHSSYAHSQSLDRLMNPLIDQYLYYLARTQSTTGSTRELQFHQAGPNTMAEQSKNWLPGPCYRQQRLSKNLDFNNNSNFAWTAATKYHLNGRNSLTNPGIPMATNKDDEDQFFPINGVLVFGKTGAANKTTLENVLMTSEEEIKTTNPVATEEYGVVSSNLQSSTAGPQSQTINSQGALPGMVWQNRDVYLQGPIWAKIPHTDGNFHPSPLMGGFGLEHPPPQILIKNTPVPANPPEVFTPAKFASFITQYSTGQVSVEIEWELQKENSKRWNPEIQYTSNYAKSNNVEFAVNPDGVYTEPRPIGTRYLTRNLMAADGYLPDWLEDNLSEGIREWWDLKPGAPKPKANQQKQDDGRGLVLPGYKYLGPFNGLDKGEPVNAADAAALEHDKAYDQQLKAGDNPYLRYNHADAEFQERLQEDTSFGGNLGRAVFQAKKRVLEPLGLVEEGAKTAPGKKRPIGSPDSSTGIGKKGQQPAKKKLNFGQTGDSESVPDPQPLGEPPAAPSSVGSGTMAAGGGAPMADNNEGADGVGNASGNWHCDSTWLGDRVITTSTRTWALPTYNNHLYKQISSSSSGATNDNHYFGYSTPWGYFDFNRFHCHFSPRDWQRLINNNWGFRPKKLRFKLLNIQVKEVTTNDGVTTIANNLTSTVQVFSDSEYQLPYVLGSAHQGCLPPFPADVFMIPQYGYLTLDNGSQSVGRSSFYCLEYFPSQMLRTGNNFEFSYSFEDVPFHSSYAHSQSLDRLMNPLIDQYLYYLARTQSTTGSTRELQFHQAGPNTMAEQSKNWLPGPCYRQQRLSKNLDFNNNSNFAWTAATKYHLNGRNSLTNPGIPMATNKDDEDQFFPINGVLVFGKTGAANKTTLENVLMTSEEEIKTTNPVATEEYGVVSSNLQSSTAGPQSQTINSQGALPGMVWQNRDVYLQGPIWAKIPHTDGNFHPSPLMGGFGLKHPPPQILIKNTPVPANPPEVFTPAKFASFITQYSTGQVSVEIEWELQKENSKRWNPEIQYTSNYAKSNNVEFAVNPDGVYTEPRPIGTRYLTRNL

SEQ ID NO: 435 - DNA, 3095 bp, Artificial Sequence
  Synthetic polynucleotide
gaattcgcccttcgcagagaccaaagttcaactgaaacgaatcaaccggtttattgattaacaagcaattacagattacgggtgaggtaacgagtgccaatggggcgaggctcagtataaacaccatcagggttcacagcaaattcaacattattagacttggcataattggaagtatactgaatttctgggttccagcgcttgctgttttctttctgcagctcccactcgatttccacgctgacttgtccggtgctgtactgcgtgatgaaggaggcaaacttggcaggagtaaacacctccggaggattagcaggtacaggtgtgtttttgatcaggatctgtggaggcgggtgtttgagtccaaaaccgcccatcagaggagacgggtgaaagttgccatccgtgtgaggaattttggcccagatgggaccctgcagatacacgtcccggttctgccagaccatgccaggcagtgctccctggctgttgatagtctgtgattgaggcccggctgtagacgactgcaggttgctggagaccacaccgtattcttctgtagccacagggttagtggtcttgatctcctcctcgctggtcatcagaacgttttccagcgtagttttgttggcagctcccgtcttgccaaaaaccagtaccccgttgatgggaaagaactggtcctcatcatccttgttggttgccatgggaatgccaggattggtcaaagagtttctgccattcagatgatatttagtggcagcagtccaggcaaaattgctgttgttgttaaagtccaagttctttgacagtctctgttgcctatagcagggtccaggcagccagttctttgactgctcggccatagtattgggcccagcttgatgaaattgcagttccctggtggaacccgtggtgctctgggtccgggccaggtagtacaggtactggtcgatgagagggttcatcagccggtctaggctctggctgtgcgcgtagctgctgtggaaaggcacgtcctcgaagctgtaactgaactcaaagttgttgcccgttctcagcatttgagaggggaaatattccaggcagtagaaggaggaacggcccaccgattggctgccgttgtccagagtcaggtagccgtactgaggaatcatgaagacgtccgccgggaacggaggcaggcagccctggtgcgcagagccgaggacgtacggcagctggtattccgagtccgagaagacctgaaccgtgctggtaaggttattagcgatggtcgtgacgccgtcattcgttgtgacctccttgacctggatgttgaggagcttgaaccgcagcttcttgggccggaatccccagttgttgttgatgagtcgctgccagtcacgtggtgagaagtggcagtggaatctgttaaagtcaaaatacccccagggggtgctgtagccgaagtagtggttgtcattggtggctcctgagctgctgctggagatttgcttgtagaggtggttgttgtaggtggggagggcccaggttctggtgctggtggtgatgactctgtcgcccagccatgtggaatcgcaatgccaatttcctgaggcattacccactccgtcggcaccttcgttattgtctgccattggtgcgccaccgcctgcagccattgtaccagatcccacactagagggcgctgctggaggttctccaagaggttgagggtcggggactgactctgagtcgccagtctgaccaaaattgagcttctttttagcgggctgctggccttttttgccgatgcccgtggaggagtctggagagcctatgggtctcttctttccaggagccgtcttagcgccttcctcaaccagaccgagaggttcgagaacccgcttcttggcctggaagactgctcgcccgaggttgcccccaaatgacgtatcttcttgcagacgctcctgaaactcggcgtcggcgtggttataccgcaggtacggattgtcacccgctttgagctgctggtcgtaggccttgtcgtgctcgagggccgctgcgtccgccgcgttgacgggctcccccttgtcgagtccgttgaagggtccgaggtacttgtagccaggaagcaccagaccccggccgtcgtcctgcttttgctggttggctttgggtttcggggctccaggtttcaggtcccaccactcgcgaatgccctcagagaggttgtcctcgagccaatctggaagataaccatcggcagccatacctggtttaagtcatttattgctcagaaacacagtcgtccaggtccacgttgaccaggtcgcaggccgagcaagcaatctcgggtgcccgccccagcagatgatgaatcgcacacagcttccgatacgtcttttttctgacgaccggttgagattctgacacgccggggaaacattctaaacagtctctgaccccgtgcgtgaagcaaatgttgaaattctgattcattctctcgcacgttttgcagggaaacagcacctgaagcatgcccgcgtgacgagaacatttgttttggtacctgtcggcaaagtccaccggagctccttccgcgtctgacgtcgatgggtccgtgactgagggacgggcccgcttgggctcgcttatatccgcgtcatcgggggcgggtcttttgctggctccgccctttctgacgtagaactcatgcgtcacctcagtcacgtgatcactagcccagcggaagaactctttgacttcctgctttgtcaccttgccaaagtcgtgttccagacggcgggtgagttcaaatttgaacatccggtcctgcaacggttgctggtgctcgaaggtggtgctgttcccgtcgatcacggcgcacatgttggtgttggaggtgacgatcacgggggtgggatcgatctgggcggacgacttgcacttttggtccacgcgcaccttgctgccgccgagaatggccttggcggactccacgaccttggccgtcatcttgccctcctcccaccagatcaccatcttgtcgacgcaatcgttgaagggaaagttctcattggtccagttgacgcagcaagggcgaattc

SEQ ID NO: 436 - DNA, 3095 bp, Artificial Sequence
  Synthetic polynucleotide
gaattcgcccttcgcagagaccaaagttcaactgaaacgaatcaaccggtttattgattaacaagcaattacagattacgggtgaggtaacgagtgccaatggggcgaggctcagtataaacaccatcagggttcacagcaaattcaacattattagacttggcataattggaagtatactgaatttctgggttccagcgcttgctgttttctttctgcagctcccactcgatttccacgctgacttgtccggtgctgtactgcgtgatgaaggaggcaaacttggcaggagtaaacacctccggaggattagcaggtacaggtgtgtttttgatcaggatctgtggaggcgggtgttcgagtccaaaaccgcccatcagaggagacgggtgaaagttgccatccgtgtgaggaattttggcccagatgggaccctgcagatacacgtcccggttctgccagaccatgccaggcagtgctccctggctgttgatagtctgtgattgaggcccggctgtagacgactgcaggttgctggagaccacaccgtattcttctgtagccacagggttagtggtcttgatctcctcctcgctggtcatcagaacgttttccagcgtagttttgttggcagctcccgtcttgccaaaaaccagtaccccgttgatgggaaagaactggtcctcatcatccttgttggttgccatgggaatgccaggattggtcaaagagtttctgccattcagatgatatttagtggcagcagtccaggcaaaattgctgttgttgttaaagtccaagttctttgacagtctctgttgcctatagcagggtccaggcagccagttctttgactgctcggccatagtattgggcccagcttgatgaaattgcagttccctggtggaacccgtggtgctctgggtccgggccaggtagtacaggtactggtcgatgagagggttcatcagccggtctaggctctggctgtgcgcgtagctgctgtggaaaggcacgtcctcgaagctgtaactgaactcaaagttgttgcccgttctcagcatttgagaggggaaatattccaggcagtagaaggaggaacggcccaccgattggctgccgttgttcagagtcaggtagccgtactgaggaatcatgaagacgtccgccgggaacggaggcaggcagccctggtgcgcagagccgaggacgtacggcagctggtattccgagtccgagaagacctgaaccgtgctggtaaggttattagcgatggtcgtgacgccgtcattcgttgtgacctccttgacctggatgttgaagagcttgaaccgcagcttcttgggccggaatccccagttgttgttgatgagtcgctgccagtcacgtggtgagaagtggcagtggaatctgttaaagtcaaaatacccccagggggtgctgtagccgaagtagtggttgtcattggtggctcctgagctgctgctggagatttgcttgtagaggtggttgttgtaggtggggagggcccaggttctggtgctggtggtgatgactctgtcgcccagccatgtggaatcgcaatgccaatttcctgaggcattacccactccgtcggcaccttcgttattgtctgccgttggtgcgccaccgcctgcagccattgtaccagatcccacactagagggcgctgctggaggttctccaagaggttgagggtcggggactgactctgagtcgccagtctgaccaaaattgagcttctttttagcgggctgctggccttttttgccgatgcccgtggaggagtctggagagtctatgggtctcttctttccaggagccgtcttagcgccttcctcaaccagaccgagaggttcgagaacccgcttcttggcctggaagactgctcgcccgaggttgcccccaaatgacgtatcttcttgcaggcgctcctgaaactcggcgtcggcgtggttataccgcaggtacggattgtcacccgctttgagctgctggtcgtaggccttgtcgtgctcgagggccgctgcgtccgccgcgttgacgggctcccccttgtcgagtccgttgaagggtccgaggtacttgtagccaggaagcaccagaccccggccgtcgtcctgcttttgctggttggctttgggtttcggggctccaggtttcaggtcccaccactcgcgaatgccctcagagaggttgtcctcgagccaatctggaagataaccatcggcagccatacctggtttaagccatttattgctcagaaacacagtcgtccaggtccacgttgaccaggtcgcaggccgagcaggcaatctcgggtgcccgccccagcagatgatgaatcgcacacagcttccgatacgtcttttttctgacgaccggttgagattctgacacgccggggaaacattctaaacagtctctgaccccgtgcgtgaagcaaatgttgaaattctgattcattctctcgcacgttttgcagggaaacagcatctgaagcatgcccgcgtggcgagaacatttgttttggtacctgtcggcaaagtccaccggagctccttccgcgtctgacgtcgatgggtccgtgactgagggacaggcccgcttgggctcgcttatatccgcgtcatcgggggcgggtcttttgctggctccgccctttctgacgtagaactcatgcgtcacctcagtcacgtgatcactagcccagcggaagaactctttgacttcctgctttgtcaccttgccaaagtcgtgttccagacggcgggtgagttcaaatttgaacatccggtcctgcaacggctgctggtgctcgaaggtggtgctgttcccgtcgatcacggcgcgcatgttggtgttggaggtgacgatcacgggggtgggatcgatctgggcggacgacttgcacttttggtccacgcgcaccttgctgccgccgagaatggccttggcggactccacgaccttggccgtcatcttgccctcctcccaccagatcaccatcttgtcgacgcaatcgttgaagggaaagttctcattggtccagttgacgcagcaagggcgaattc

SEQ ID NO: 437 - protein, 729 aa, Artificial Sequence; identical to SEQ ID NO: 165
  Synthetic polypeptide

SEQ ID NO: 438 - protein, 729 aa, Artificial Sequence
  Synthetic polypeptide
MAADGYLPDWLEDNLSEGIREWWDLKPGAPKPKANQQKQDDGRGLVLPGYKYLGPFNGLDKGEPVNAADAAALEHDKAYDQQLKAGDNPYLRYNHADAEFQERLQEDTSFGGNLGRAVFQAKKRVLEPLGLVEEGAKTAPGKKRPIDSPDSSTGIGKKGQQPAKKKLNFGQTGDSESVPDPQPLGEPPAAPSSVGSGTMAAGGGAPTADNNEGADGVGNASGNWHCDSTWLGDRVITTSTRTWALPTYNNHLYKQISSSSSGATNDNHYFGYSTPWGYFDFNRFHCHFSPRDWQRLINNNWGFRPKKLRFKLFNIQVKEVTTNDGVTTIANNLTSTVQVFSDSEYQLPYVLGSAHQGCLPPFPADVFMIPQYGYLTLNNGSQSVGRSSFYCLEYFPSQMLRTGNNFEFSYSFEDVPFHSSYAHSQSLDRLMNPLIDQYLYYLARTQSTTGSTRELQFHQAGPNTMAEQSKNWLPGPCYRQQRLSKNLDFNNNSNFAWTAATKYHLNGRNSLTNPGIPMATNKDDEDQFFPINGVLVFGKTGAANKTTLENVLMTSEEEIKTTNPVATEEYGVVSSNLQSSTAGPQSQTINSQGALPGMVWQNRDVYLQGPIWAKIPHTDGNFHPSPLMGGFGLKHPPPQILIKNTPVPANPPEVFTPAKFASFITQYSTGQVSVEIEWELQKENSKRWNPEIQYTSNYAKSNNVEFAVNPDGVYTEPRPIGTRYLTRNL

SEQ ID NO: 439 - protein, 729 aa, Artificial Sequence
  Synthetic polypeptide
MAADGYLPDWLEDNLSEGIREWWDLKPGAPKPKANQQKQDDGRGLVLPGYKYLGPFNGLDKGEPVNAADAAALEHDKAYDQQLKAGDNPYLRYNHADAEFQERLQEDTSFGGNLGRAVFQAKKRVLEPLGLVEEGAKTAPGKKRPIDSPDSSTGIGKKGQQPAKKKLNFGQTGDSESVPDPQPLGEPPAAPSSVGSGTMAAGGGAPMADNNEGADGVGNASGNWHCDSTWLGDRVITTSTRTWALPTYNNHLYKQISSSSSGATNDNHYFGYSTPWGYFDFNRFHCHFSPRDWQRLINNNWGFRPKKLRFKLFNIQVKEVTTNDGVTTIANNLTSTVQVFSDSEYQLPYVLGSAHQGCLPPFPADVFMIPQYGYLTLNNGSQSVGRSSFYCLEYFPSQMLRTGNNFEFSYSFEDVPFHSSYAHSQSLDRLMNPLIDQYLYYLARTQSTTGSTRELQFHQAGPNTMAEQSKNWLPGPCYRQQRLSKNLDFNNNSNFAWTAATKYHLNGRNSLTNPGIPMATNKDDEDQFFPINGVLVFGKTGAANKTTLENVLMTSEEEIKTTNPVATEEYGVVSSNLQSSTAGPQSQTINSQGALPGMVWQNRDVYLQGPIWAKIPHTDGNFHPSPLMGGFGLKHPPPQILIKNTPVPANPPEVFTPAKFASFITQYSTGQVSVEIEWELQKENSKRWNPEIQYTSNYAKSNNVEFAVNPDGVYTEPRPIGTRYLTRNL

SEQ ID NO: 440 - DNA, 2217 bp, Artificial Sequence
  Synthetic polynucleotide
atggctgctgacggttatcttccagattggctcgaggacaacctctctgagggcattcgcgagtggtgggacctgaaacctggagcccccaagcccaaggccaaccagcagaagcaggacgacggccggggtctggtgcttcctggctacaagtacctcggacccttcaacggactcgacaagggggagcccgtcaacgcggcggacgcagcggccctcgagcacgacaaggcctacgaccagcagctcaaagcgggtgacaatccgtacctgcggtataaccacgccgacgccgagtttcaggagcgtctacaagaagatacgtcttttgggggcaacctcgggcgagcagtcttccaggccaagaagcgggttctcgaacctctcggtctggttgaggaagctgctaagacggctcctggaaagaagagaccggtagaaccgtcacctcagcgttcccccgactcctccacgggcatcggcaagaaaggccagcggcccgctaaaaagagactgaactttggtcagactggcgactcagagtcagtccccgaccctcaaccaatcggagaaccaccagcaggcccctctggtctgggatctggtacaatggctgcaggcggtggcgctccaatggcagacaataacgaaggcgccgacggagtgggtagttcctcaggaaattggcattgcgattccacatggctgggcgacagagtcatcaccaccagcacccgaacctgggccctgcccacctacaacaaccacctctacaagcaaatatccaatgggacatcgggaggaagcaccaacgacaacacctacttcggctacagcaccccctgggggtattttgacttcaacagattccactgccacttctcaccacgtgactggcagcgactcatcaacaacaactggggattccggccaaaaagactcagcttcaagcccttcaacatccaggtcaaggaggtcacgcagaatgaaggcaccaagaccatcgccaataaccttaccagcacgattcaggtatttacggactcggaataccagctgccgtacgtcctcggctccgcgcaccagggctgcctgcctccgttcccggcggacgtcttcatgattccccagtacggctaccttacactgaacaatggaagtcaagccgtaggccgttcctccttctactgcctggaatattttccatctcaaatgctgcgaactggaaacaattttgaattcagctacaccttcgaggacgtgcctttccacagcagctacgcacacagccagagcttggaccgactgatgaatcctctcatcgaccagtacctgcactacttatccagaactcagtccacaggaggaactcaaggtacccagcaattgttattttctcaagctgggcctgcaaacatgtcggctcaggctaagaactggctacctggaccttgctaccggcagcagcgagtctctacgacactgtcgcaaaacaacaacagcaactttgcttggactggtgccaccaaatatcacctgaacggaagagactctttggtaaatcccggtgtcgccatggcaacccacaaggacgacgaggaacgcttcttcccgtcgagtggagtcctgatgtttggaaaacagggtgctggaagagacaatgtggactacagcagcgttatgctaaccagcgaagaagaaattaaaaccactaaccctgtagccacagaacaatacggtgtggtggctgacaacttgcagcaaaccaatacagggcctattgtgggaaatgtcaacagccaaggagccttacctggcatggtctggcagaaccgagacgtgtacctgcagggtcccatctgggccaagattcctcacacggacggcaacttccacccttcaccgctaatgggaggatttggactgaagcacccacctcctcagatcctgatcaagaacacgccggtacctgcggatcctccaacaacgttcagccaggcgaaattggcttccttcattacgcagtacagcaccggacaggtcagcgtggaaatcgagtgggagctgcagaaggagaacagcaaacgctggaacccagagattcagtacacttcaaactactacaaatctacaaatgtggactttgctgtcaatacagagggaacttattctgagcctcgccccattggtactcgctacctcacccgtaatctgtaa

SEQ ID NO: 441 - protein, 738 aa, Artificial Sequence
  Synthetic polypeptide
MAADGYLPDWLEDNLSEGIREWWDLKPGAPKPKANQQKQDDGRGLVLPGYKYLGPFNGLDKGEPVNAADAAALEHDKAYDQQLKAGDNPYLRYNHADAEFQERLQEDTSFGGNLGRAVFQAKKRVLEPLGLVEEAAKTAPGKKRPVEPSPQRSPDSSTGIGKKGQRPAKKRLNFGQTGDSESVPDPQPIGEPPAGPSGLGSGTMAAGGGAPMADNNEGADGVGSSSGNWHCDSTWLGDRVITTSTRTWALPTYNNHLYKQISNGTSGGSTNDNTYFGYSTPWGYFDFNRFHCHFSPRDWQRLINNNWGFRPKRLSFKPFNIQVKEVTQNEGTKTIANNLTSTIQVFTDSEYQLPYVLGSAHQGCLPPFPADVFMIPQYGYLTLNNGSQAVGRSSFYCLEYFPSQMLRTGNNFEFSYTFEDVPFHSSYAHSQSLDRLMNPLIDQYLHYLSRTQSTGGTQGTQQLLFSQAGPANMSAQAKNWLPGPCYRQQRVSTTLSQNNNSNFAWTGATKYHLNGRDSLVNPGVAMATHKDDEERFFPSSGVLMFGKQGAGRDNVDYSSVMLTSEEEIKTTNPVATEQYGVVADNLQQTNTGPIVGNVNSQGALPGMVWQNRDVYLQGPIWAKIPHTDGNFHPSPLMGGFGLKHPPPQILIKNTPVPADPPTTFSQAKLASFITQYSTGQVSVEIEWELQKENSKRWNPEIQYTSNYYKSTNVDFAVNTEGTYSEPRPIGTRYLTRNL

SEQ ID NO: 442 - DNA, 2217 bp, Artificial Sequence
  Synthetic polynucleotide
atggctgctgacggttatcttccagattggctcgaggacaacctctctgagggcattcgcgagtggtgggacctgaaacctggagcccccaagcccaaggccaaccagcagaagcaggacgacggccggggtctggtgcttcctggctacaagtacctcggacccttcaacggactcgacaagggggagcccgtcaacgcggcggacgcagcggccctcgagcacgacaaggcctacgaccagcagctcaaagcgggtgacaatccgtacctgcggtataaccacgccgacgccgagtttcaggagcgtctgcaagaagatacgtcttttgggggcaacctcgggcgagcagtcttccaggccaagaagcgggttctcgaacctctcggtctggttgaggaagctgctaagacggctcctggaaagaagagaccggtagaaccgtcacctcagcgttcccccgactcctccacgggcatcggcaagaaaggccagcagcccgctaaaaagagactgaactttggtcagactggcgactcagagtcagtccccgaccctcaaccaatcggagaaccaccagcaggcccctctggtctgggatctggtacaatggctgcaggcggtggcgctccaatggcagacaataacgaaggcgccgacggagtgggtagttcctcaggaaattggcattgcgattccacatggctgggcgacagagtcatcaccaccagcacccgaacctgggccctgcccacctacaacaaccacctctacaagcaaatatccaatgggacatcgggaggaagcaccaacgacaacacctacttcggctacagcaccccctgggggtattttgacttcaacagattccactgccacttctcaccacgtgactggcagcgactcatcaacaacaactggggattccggccaaaaagactcagcttcaagctcttcaacatccaggtcaaggaggtcacgcagaatgaaggcaccaagaccatcgccaataaccttaccagcacgattcaggtatttacggactcggaataccagctgccgtacgtcctcggctccgcgcaccagggctgcctgcctccgttcccggcggacgtcttcatgattccccagtacggctaccttacactgaacaatggaagtcaagccgtaggccgttcctccttctactgcctggaatattttccatctcaaatgctgcgaactggaaacaattttgaattcagctacaccttcgaggacgtgcctttccacagcagctacgcacacagccagagcttggaccgactgatgaatcctctcatcgaccagtacctgtactacttatccagaactcagtccacaggaggaactcaaggtacccagcaattgttattttctcaagctgggcctgcaaacatgtcggctcaggctaagaactggctacctggaccttgctaccggcagcagcgagtctctacgacactgtcgcaaaacaacaacagcaactttgcttggactggtgccaccaaatatcacctgaacggaagagactctttggtaaatcccggtgtcgccatggcaacccacaaggacgacgaggaacgcttcttcccgtcgagtggagtcctgatgtttggaaaacagggtgctggaagagacaatgtggactacagcagcgttatgctaaccagcgaagaagaaattaaaaccactaaccctgtagccacagaacaatacggtgtggtggctgataacttgcagcaaaccaatacggggcctattgtgggaaatgtcaacagccaaggagccttacctggcatggtctggcagaaccgagacgtgtacctgcagggtcccatctgggccaagattcctcacacggacggcaacttccacccttcaccgctaatgggaggatttggactgaagcacccacctcctcagatcctgatcaagaacacgccggtacctgcggatcctccaacaacgttcagccaggcgaaattggcttccttcattacgcagtacagcaccggacaggtcagcgtggaaatcgagtgggagctgcagaaggagaacagcaaacgctggaacccagagattcagtacacttcaaactactacaaatctacaaatgtggactttgctgtcaatacagagggaacttattctgagcctcgccccattggtactcgttacctcacccgtaatctgtaa

SEQ ID NO: 443 - protein, 738 aa, Artificial Sequence; identical to SEQ ID NO: 95
  Synthetic polypeptide

SEQ ID NO: 444 - protein, 738 aa, Artificial Sequence
  Synthetic polypeptide
MAADGYLPDWLEDNLSEGIREWWDLKPGAPKPKANQQKQDDGRGLVLPGYKYLGPFNGLDKGEPVNAADAAALEHDKAYDQQLKAGDNPYLRYNHADAEFQERLQEDTSFGGNLGRAVFQAKKRVLEPLGLVEEAAKTAPGKKRPVEPSPQRSPDSSTGIGKKGQQPAKKRLNFGQTGDSESVPDPQPIGEPPAGPSGLGSGTMAAGGGAPMADNNEGADGVGSSSGNWHCDSTWLGDRVITTSTRTWALPTYNNHLYKQISNGTSGGSTNDNTYFGYSTPWGYFDFNRFHCHFSPRDWQRLINNNWGFRPKRLSFKLFNIQVKEVTQDEGTKTIANNLTSTIQVFTDSEYQLPYVLGSAHQGCLPPFPADVFMIPQYGYLTLNNGSQAVGRSSFYCLEYFPSQMLRTGNNFEFSYTFEDVPFHSSYAHSQSLDRLMNPLIDQYLYYLSRTQSTGGTQGTQQLLFSQAGPANMSARAKNWLPGPCYRQQRVSTTLSQNNNSNFAWTGATKYHLNGRDSLVNPGVAMATHKDDEERFFPSSGVLMFGKQGAGRDNVDYSSVMLTSEEEIKTTNPVATEQYGVVADNLQQANTGPIVGNVNSQGALPGMVWQNRDVYLQGPIWAKIPHTDGNFHPSPLMGGFGLKHPPPQILIKNTPVPADPPTTFSQAKLASFITQYSTGQVSVEIEWELQKENSKRWNPEIQYTSNYYKSTNVDFAVNSEGTYSEPRPIGTRYLTRNL

SEQ ID NO: 445 - DNA, 2217 bp, Artificial Sequence
  Synthetic polynucleotide
atggctgctgacggttatcttccagattggctcgaggacaacctctctgagggcattcgcgagtggtgggacctgaaacctggagcccccaagcccaaggccaaccagcagaagcaggacgacggccggggtctggtgcttcctggctacaagtacctcggacccttcaacggactcgacaagggggagcccgtcaacgcggcggacgcagcggccctcgagcacgacaaggcctacgaccagcagctcaaagcgggtgacaatccgtacctgcggtataaccacgccgacgccgagtttcaggagcgtctgcaagaagatacgtcttttgggggcaacctcgggcgagcagtcttccaggccaagaagcgggttctcgaacctctcggtctggttgaggaagctgctaagacggctcctggaaagaagagaccggtagaaccgtcacctcagcgttcccccgactcctccacgggcatcggcaagaaaggccagcagcccgctaaaaagagactgaactttggtcagactggcgactcagagtcagtccccgaccctcaaccaatcggagaaccaccagcaggcccctctggtctgggatctggtacaatggctgcaggcggtggcgctccaatggcagacaataacgaaggcgccgacggagtgggtagttcctcaggaaattggcattgcgattccacatggctgggcgacagagtcatcaccaccagcacccgaacctgggccctgcccacctacaacaaccacctctacaagcaaatatccaatgggacatcgggaggaagcaccaacgacaacacctacttcggctacagcaccccctgggggtattttgacttcaacagattccactgccacttctcaccacgtgactggcagcgactcatcaacaacaactggggattccggccaaaaagactcagcttcaagctcttcaacatccaggtcaaggaggtcacgcaggatgaaggcaccaagaccatcgccaataaccttaccagcacgattcaggtatttacggactcggaataccagctgccgtacgtcctcggctccgcgcaccagggctgcctgcctccgttcccggcggacgtcttcatgattccccagtacggctaccttacactgaacaatggaagtcaagccgtaggccgttcctccttctactgcctggaatattttccatctcaaatgctgcgaactggaaacaattttgaattcagctacaccttcgaggacgtgcctttccacagcagctacgcacacagccagagcttggaccgactgatgaatcctctcatcgaccagtacctgtactacttatccagaactcagtccacaggaggaactcaaggtacccagcaattgttattttctcaagctgggcctgcaaacatgtcggctcgggctaagaactggctacctggaccttgctaccggcagcagcgagtctctacgacactgtcgcaaaacaacaacagcaactttgcttggactggtgccaccaaatatcacctgaacggaagagactctttggtaaatcccggtgttgctatggcaacgcataaggacgacgaggaacgtttctttccatcgagcggagtcctgatgtttggaaaacagggtgctggaagagacaatgtggactatagcagcgttatgctaaccagcgaggaagaaattaaaaccactaaccctgtagccacagaacaatacggtgtggtggctgacaacttgcagcaagccaatacagggcctattgtgggaaatgtcaacagccaaggagccttacctggcatggtctggcagaaccgagacgtgtacctgcagggtcccatctgggccaaaattcctcacacggacggcaattttcacccgtctcctctgatgggcggctttggactgaagcacccacctccccagatcctgatcaagaatacgccggtacctgcggatcctccaacgacgttcagccaggcaaaattggcttccttcatcacgcagtacagcaccggccaggtcagcgtggagatcgagtgggagctgcagaaggagaacagcaagcgatggaacccagaaattcagtacacttccaactactacaaatctacaaatgtggactttgctgtcaattctgagggtacatattcagagcctcgccccattggtactcgttatctgacacgtaatctgtaa

SEQ ID NO: 446 - DNA, 2211 bp, Artificial Sequence
  Synthetic polynucleotide
atggctgccgatggttatcttccagattggctcgaggacaacctctctgagggcattcgcgagtggtgggacttgaaacctggagccccgaaacccaaagccaaccagcaaaagcaggacgacggccggggcctggtgcttcctggctacaagtacctcggacccttcaacggactcgacaagggggagcccgtcaacgcggcggacgcagcggccctcgagcacgacaaggcctacgaccagcagctcgaagcgggtgacaatccgtacctgcggtataaccacgccgacgccgagtttcaggagcgtctgcaagaagatacgtcttttgggggcaacctcgggcgagcagtcttccaggccaagaagcgggttctcgaacctctcggtctggttgaggaaggcgctaagacggctcctggaaagaagagaccagtagagcagtcaccccaagaaccagactcctcctcgggcatcggcaagaaaggccaacagcccgccagaaaaagactcaattttggccagactggcgactcagagtcagttccagaccctcaacctctcggagaacctccagcagcgccctctggtgtgggacctaatacaatggctgcaggcggtggcgcaccaatggcagacaataacgaaggcgccgacggagtgggtagttcctcgggaaattggcattgcgattccacatggctgggcgacagagtcatcaccaccagcacccgaacctgggccctgcccacctacaacaaccacctctacaagcaaatctccaacgggacatcgggaggagccaccaacgacaacacctacttcggctacagcaccccctgggggtattttgactttaacagattccactgccacttttcaccacgtgactggcagcgactcatcaacaacaactggggattccggcccaagagactcagcttcaagctcttcaacatccaggtcaaggaggtcacgcagaatgaaggcaccaagaccatcgccaataacctcaccagcaccatccaggtgtttacggactcggagtaccagctgccgtacgttctcggctctgcccaccagggctgcctgcctccgttcccggcggacgtgttcatgattccccagtacggctacctaacactcaacaacggtagtcaggccgtgggacgctcctccttctactgcctggaatactttccttcgcagatgctgagaaccggcaacaacttccagtttacttacaccttcgaggacgtgcctttccacagcagctacgcccacagccagagcttggaccggctgatgaatcctctgattgaccagtacctgtactacttgtctcggactcaaacaacaggaggcacggcaaatacgcagactctgggcttcagccaaggtgggcctaatacaatggccaatcaggcaaagaactggctgccaggaccctgttaccgccaacaacgcgtctcaacgacaaccgggcaaaacaacaatagcaactttgcctggactgctgggaccaaataccatctgaatggaagaaattcattggctaatcctggcatcgctatggcaacacacaaagacgacgaggagcgttttttcccagtaacgggatcctgtttttggcaacaaaatgctgccagagacaatgcggattacagcgatgtcatgctcaccagcgaggaagaaatcaaaaccactaaccctgtggctacagaggaatacggtatcgtggcagataacttgcagcagcaaaacacggctcctcaaattggaactgtcaacagccagggggccttacccggtatggtctggcagaaccgggacgtgtacctgcagggtcccatctgggccaagattcctcacacggacggcaacttccacccgtctccgctgatgggcggctttggcctgaaacatcctccgcctcagatcctgatcaagaacacgcctgtacctgcggatcctccgaccaccttcaaccagtcaaagctgaactctttcatcacgcaatacagcaccggacaggtcagcgtggaaattgaatgggagctacagaaggaaaacagcaagcgctggaaccccgagatccagtacacctccaactactacaaatctacaagtgtggactttgctgttaatacagaaggcgtgtactctgaaccccgccccattggcacccgttacctcacccgtaatctgtaa

SEQ ID NO: 447 - protein, 736 aa, Artificial Sequence
  Synthetic polypeptide
MAADGYLPDWLEDNLSEGIREWWDLKPGAPKPKANQQKQDDGRGLVLPGYKYLGPFNGLDKGEPVNAADAAALEHDKAYDQQLEAGDNPYLRYNHADAEFQERLQEDTSFGGNLGRAVFQAKKRVLEPLGLVEEGAKTAPGKKRPVEQSPQEPDSSSGIGKKGQQPARKRLNFGQTGDSESVPDPQPLGEPPAAPSGVGPNTMAAGGGAPMADNNEGADGVGSSSGNWHCDSTWLGDRVITTSTRTWALPTYNNHLYKQISNGTSGGATNDNTYFGYSTPWGYFDFNRFHCHFSPRDWQRLINNNWGFRPKRLSFKLFNIQVKEVTQNEGTKTIANNLTSTIQVFTDSEYQLPYVLGSAHQGCLPPFPADVFMIPQYGYLTLNNGSQAVGRSSFYCLEYFPSQMLRTGNNFQFTYTFEDVPFHSSYAHSQSLDRLMNPLIDQYLYYLSRTQTTGGTANTQTLGFSQGGPNTMANQAKNWLPGPCYRQQRVSTTTGQNNNSNFAWTAGTKYHLNGRNSLANPGIAMATHKDDEERFFPVTGSCFWQQNAARDNADYSDVMLTSEEEIKTTNPVATEEYGIVADNLQQQNTAPQIGTVNSQGALPGMVWQNRDVYLQGPIWAKIPHTDGNFHPSPLMGGFGLKHPPPQILIKNTPVPADPPTTFNQSKLNSFITQYSTGQVSVEIEWELQKENSKRWNPEIQYTSNYYKSTSVDFAVNTEGVYSEPRPIGTRYLTRNL

SEQ ID NO: 448 - DNA, 2214 bp, Artificial Sequence
  Synthetic polynucleotide
atggctgctgacggttatcttccagattggctcgaggacaacctctctgagggcattcgcgagtggtgggacctgaaacctggagcccccaagcccaaggccaaccagcagaagcaggacgacggccggggtctggtgcttcctggctacaagtacctcggacccttcaacggactcgacaagggggagcccgtcagcgcggcggacgcagcggccctcgagcacgacaaggcctgcgaccagcggctcaaagcgggtgacaatccgtacctgcggtataaccacgccgacgccgagtttcaggagcgtctgcaagaagatacgtcttttgggggcaacctcgggcgagcagtcttccaggccaagaagcgggttctcgaacctctcggtctggttgaggaagctgctaagacggctcctggaaagaagggaccggtagaaccgtcacctcagcgttcccccgactcctccacgggcatcggcaagaaaggccagcagcccgctagaaagagactgaactttgggcagactggcgactcagagtcagtccccgaccctcaaccaatcggagaaccaccagcaggcccctctggtctgggatctggtacaatggctgcaggcggtggcgcaccaatggctgacaataacgagggcgccgacggagtgggtaatgcctcaggaaattggcattgcgattccacatggctgggcgacagagtcatcaccaccagcacccgaacctgggctttgcccacctacaacaatcacctctacaagcaaatctccagtcagtcagcaggtagcaccaacgacaacgtctacttcggctacagcaccccctgggggtattttgacttcaacagattccactgtcacttctcaccacgtgactggcagcggctcatcaacaacaactggggattccggcccaagaagctcaacttcaagctgttcaacatccaggtcaaggaggtcacaacgaatgacggcgtcacgaccatcgccaataaccttaccagcacggttcaggtcttttcggactcggaataccagctgccctacgtcctcggctccgcacaccagggctgcctgcctccgttcccggcggacgtcttcatgattccccagtacggctacctgactctgaacaatggcagccaatcggtgggtcgttcctctttctactgcctggaatatttcccttctcaaatgctgagaacgggcaacaacttcaccttcagctacaccttcgaggacgttcccttccacagcagctacgcacacagccagagcctggaccggctgatgaatcctcttatcgaccagtacctgtattacctggccagaacacagagcaacgcaggaggcacagctggcaatcgggaactgcagttttatcagggcgggcctaccaccatggccgaacaagccaaaaactggctgcctggaccttgcttccggcaacaaagagtctccaagacgctggatcaaaacaacaacagcaactttgcttggactggtgccaccaaataccatctaaatggaagaaattcattggttaatcccggtgtcgccatggcaacccacaaggacgacgaggaacgcttcttcccttcgagcggagtcctgatttttggaaaaactggagcagctaataagactacactggaaaatgtgttaatgacaaatgaagaggaaattcgtcctaccaacccggtagccaccgaggaatacgggactgttagcagcaacctgcaggcggctaacactgcagcccagacacaagttgtcaacaaccagggagccttacctggtatggtctggcagaaccgggacgtgtacctgcagggtcccatctgggccaagattcctcacacggacggcaactttcacccgtctccgctgatgggcggctttggactgaagcatccgcctcctcagatcctgatcaaaaacactcctgttcctgctaatcccccggaggtgtttacgcctgccaagtttgcttctttcatcacacagtacagcaccggccaggtcagcgtggagatcgagtgggagctgcagaaggagaacagcaagcgctggaacccagagattcagtatacctccaattttgacgaacagactggtgtggactttgccgttgacagccagggtgtttattctgagcctcgccccattggtactcgttacctcacccgtaatctgtaa

SEQ ID NO: 449 - protein, 737 aa, Artificial Sequence
  Synthetic polypeptide
MAADGYLPDWLEDNLSEGIREWWDLKPGAPKPKANQQKQDDGRGLVLPGYKYLGPFNGLDKGEPVSAADAAALEHDKACDQRLKAGDNPYLRYNHADAEFQERLQEDTSFGGNLGRAVFQAKKRVLEPLGLVEEAAKTAPGKKGPVEPSPQRSPDSSTGIGKKGQQPARKRLNFGQTGDSESVPDPQPIGEPPAGPSGLGSGTMAAGGGAPMADNNEGADGVGNASGNWHCDSTWLGDRVITTSTRTWALPTYNNHLYKQISSQSAGSTNDNVYFGYSTPWGYFDFNRFHCHFSPRDWQRLINNNWGFRPKKLNFKLFNIQVKEVTTNDGVTTIANNLTSTVQVFSDSEYQLPYVLGSAHQGCLPPFPADVFMIPQYGYLTLNNGSQSVGRSSFYCLEYFPSQMLRTGNNFTFSYTFEDVPFHSSYAHSQSLDRLMNPLIDQYLYYLARTQSNAGGTAGNRELQFYQGGPTTMAEQAKNWLPGPCFRQQRVSKTLDQNNNSNFAWTGATKYHLNGRNSLVNPGVAMATHKDDEERFFPSSGVLIFGKTGAANKTTLENVLMTNEEEIRPTNPVATEEYGTVSSNLQAANTAAQTQVVNNQGALPGMVWQNRDVYLQGPIWAKIPHTDGNFHPSPLMGGFGLKHPPPQILIKNTPVPANPPEVFTPAKFASFITQYSTGQVSVEIEWELQKENSKRWNPEIQYTSNFDEQTGVDFAVDSQGVYSEPRPIGTRYLTRNL

SEQ ID NO: 450 - DNA, 2214 bp, Artificial Sequence
  Synthetic polynucleotide
atggctgccgatggttatcttccagattggctcgaggacaacctctctgagggcattcgcgagtggtgggacctgaaacctggagccccgaaacccaaagccaaccagcaaaagcaggacgacggccggggtctggtgcttcctggctacaagtacctcggacccttcaacggactcgacaagggggagcccgtcaacgcggcggacgcagcggccctcgagcacgacaaggcctacgaccagcagctcaaagcgggtgacaatccgtacctgcggtataaccacgccgacgccgagtttcaggagcgtctgcaagaagatacgtcttttgggggcaacctcgggcgagcagtcttccaggccaagaagcgggttctcgaacctctcggtctggttgaggaagctgctaagacggctcctggaaagaagagaccggtagaaccgtcacctcagcgttcccccgactcctccacgggcatcggcaagaaaggccagcagcccgctagaaagagactgaactttgggcagactggcgactcagagtcagtccccgaccctcaaccaatcggagaaccaccagcaggcccctctggtctgggatctggtacaatggctgcaggcggtggcgctccaatggcagacaataacgaaggcgccgacggagtgggtaatgcctcaggaaattggcattgcgattccacatggctgggcgacagagtcatcaccaccagcacccgaacctgggctttgcccacctacaacaaccacctctacaagcaaatctccagtcagtcagcaggtagcaccaacgacaacgtctacttcggctacagcaccccctgggggtattttgacttcaacagattccactgtcacttctcaccacgtgactggcagcggctcatcaacaacaactggggattccggcccaagaagctcaacttcaagctgttcaacatccaggtcaaggaggtcacaacgaatgacggcgtcacgaccatcgccaataaccttaccagcacggttcaggtcttttcggactcggaataccagctgccctacgtcctcggctccgcacaccagggctgcctgcctccgttcccggcggacgtcttcatgattcctcagtacggctacctgactctcaacaacggtagtcaggccgtgggacgttcctccttctactgcctggagtacttcccctctcagatgctgagaacgggcaacaacttttccttcagctacactttcgaggacgtgcctttccacagcagctacgcgcacagccagagtttggacaggctgatgaatcctctcatcgaccagtacctgtactacctgtcaagaacccagtctacgggaggcacagcgggaacccagcagttgctgttttctcaggccgggcctagcaacatgtcgactcaggccagaaactggctgcctggaccctgctacagacagcagcgcgtctccacgacactgtcgcaaaacaacaacagcaactttgcctggactggtgccaccaagtatcatctgaacggcagagactctctggtgaatccgggcgtcgccatggcaaccaacaaggacgacgaggaccgcttcttcccatccagcggcatcctcatgtttggcaagcagggagctggaaaagacaacgtggactatagcaacgtgatgctaaccagcgaggaagaaatcaagaccaccaaccccgtggccacagaacagtatggcgtggtggctgataacctacagcagcaaaacaccgctcctattgtgggggccgtcaacagccagggagccttacctggcatggtctggcagaaccgggacgtgtacctgcagggtcctatttgggccaagattcctcacacagatggcaactttcacccgtctcctttaatgggcggctttggacttaaacatccgcctcctcagatccttatcaaaaacactcctgttcctgcggatcctccaacagcgttcaaccaggccaagctgaattctttcatcacgcagtacagcaccggacaagtcagcgtggagatcgagtgggagctgcagaaggagaacagcaagcgctggaacccagagattcagtatacttccaactactacaaatctacaaatgtggactttgctgttaatactgagggtgcttactctgagcctcgccccattggcactcgttacctcacccgtaatctgtaa

SEQ ID NO: 451 - protein, 737 aa, Artificial Sequence
  Synthetic polypeptide
MAADGYLPDWLEDNLSEGIREWWDLKPGAPKPKANQQKQDDGRGLVLPGYKYLGPFNGLDKGEPVNAADAAALEHDKAYDQQLKAGDNPYLRYNHADAEFQERLQEDTSFGGNLGRAVFQAKKRVLEPLGLVEEAAKTAPGKKRPVEPSPQRSPDSSTGIGKKGQQPARKRLNFGQTGDSESVPDPQPIGEPPAGPSGLGSGTMAAGGGAPMADNNEGADGVGNASGNWHCDSTWLGDRVITTSTRTWALPTYNNHLYKQISSQSAGSTNDNVYFGYSTPWGYFDFNRFHCHFSPRDWQRLINNNWGFRPKKLNFKLFNIQVKEVTTNDGVTTIANNLTSTVQVFSDSEYQLPYVLGSAHQGCLPPFPADVFMIPQYGYLTLNNGSQAVGRSSFYCLEYFPSQMLRTGNNFSFSYTFEDVPFHSSYAHSQSLDRLMNPLIDQYLYYLSRTQSTGGTAGTQQLLFSQAGPSNMSTQARNWLPGPCYRQQRVSTTLSQNNNSNFAWTGATKYHLNGRDSLVNPGVAMATNKDDEDRFFPSSGILMFGKQGAGKDNVDYSNVMLTSEEEIKTTNPVATEQYGVVADNLQQQNTAPIVGAVNSQGALPGMVWQNRDVYLQGPIWAKIPHTDGNFHPSPLMGGFGLKHPPPQILIKNTPVPADPPTAFNQAKLNSFITQYSTGQVSVEIEWELQKENSKRWNPEIQYTSNYYKSTNVDFAVNTEGAYSEPRPIGTRYLTRNL

SEQ ID NO: 452 - DNA, 2217 bp, Artificial Sequence
  Synthetic polynucleotide
atggctgccgatggttatcttccagattggctcgaggacaacctctctgagggcattcgcgagtggtgggacctgaaacctggagccccgaaacccaaagccaaccagcaaaagcaggacgacggccggggtctggtgcttcctggctacaagtacctcggacccttcaacggactcgacaagggggagcccgtcaacgcggcggacgcagcggccctcgagcacgacaaggcctacgaccagcagctcaaagcgggtgacaatccgtacctgcggtataatcacgccgacgccgagtttcaggagcgtctgcaagaagatacgtcttttgggggcaacctcgggcgagcagtcttccaggccaagaagcgggttctcgaacctctcggtctggttgaggaaggcgctaagacggctcctggaaagaagagaccggtagagccgtcaccacagcgttcccccgactcctccacgggcatcggcaagaaaggccagcagcccgccagaaagagactcaatttcggtcagactggcgactcagagtcagtccccgaccctcaacctatcggagaacctccagcagcgccctctagtgtgggatctggtacaatggctgcaggcggtggcgcaccaatggcagacaataacgaaggtgccgacggagtgggtagttcctcgggaaattggcattgcgattccacatggctgggcgacagagtcatcaccaccagcacccgaacctgggccctgcccacctacaacaaccacctctacaagcaaatctccaacgggacctcgggaggcagcaccaacgacaacacctactttggctacagcaccccctgggggtattttgactttaacagattccactgccacttctcaccacgtgactggcagcgactcatcaacaacaactggggattccggcccaagagactcagcttcaagctcttcaacatccaggtcaaagaggtcacgcagaatgaaggcaccaagaccatcgccaataacctcaccagcaccatccaggtgtttacggactcggaataccagctgccgtacgtcctcggctctgcccaccagggctgcctgcctccgttcccggcggacgtcttcatgattcctcagtacggctacctgactctcaacaacggtagtcaggccgtgggacgttcctccttctactgcctggagtacttcccctctcagatgctgagaacgggcaacaacttttccttcagctacactttcgaggacgtgcctttccacagcagctacgcgcacagccagagtttggacaggctgatgaatcctctcatcgaccagtacctgtactacctgtcaagaacccagtctacgggaggcacagcgggaacccagcagttgctgttttctcaggccgggcctagcaacatgtcggctcaggccagaaactggctgcctggaccctgctacagacagcagcgcgtctccacgacactgtcgcaaaacaacaacagcaactttgcctggactggtgccaccaagtatcatctgaacggcagagactctctggtgaatccgggcgtcgccatggcaaccaacaaggacgacgaggaccgcttcttcccatccagcggcatcctcatgtttggcaagcagggagctggaaaagacaacgtggactatagcaacgtgatgctaaccagcgaggaagaaatcaaggccaccaaccccgtggccacagaacagtatggcgtggtggctgataacctacagcagcaaaacaccgctcctattgtgggggccgtcaacagccagggagccttacctggcatggtctggcagaaccgggacgtgtacctgcagggtcctatttgggccaagattcctcacacagatggcaactttcacccgtctcctttaatgggcggctttggacttaaacatccgcctcctcagatcctcatcaaaaacactcctgttcctgcggatcctccaacagcgttcaaccaggccaagctgaattctttcatcacgcagtacagcaccggacaagtcagcgtggagatcgagtgggagctgcagaaggagaacagcaagcgctggaacccagagattcagtatacttccaactactacaaatctacaaatgtggactttgctgttaatactgagggtgtttactctgagcctcgccccattggcactcgttacctcacccgtaatctgtaa

SEQ ID NO: 453 - protein, 738 aa, Artificial Sequence
  Synthetic polypeptide
MAADGYLPDWLEDNLSEGIREWWDLKPGAPKPKANQQKQDDGRGLVLPGYKYLGPFNGLDKGEPVNAADAAALEHDKAYDQQLKAGDNPYLRYNHADAEFQERLQEDTSFGGNLGRAVFQAKKRVLEPLGLVEEGAKTAPGKKRPVEPSPQRSPDSSTGIGKKGQQPARKRLNFGQTGDSESVPDPQPIGEPPAAPSSVGSGTMAAGGGAPMADNNEGADGVGSSSGNWHCDSTWLGDRVITTSTRTWALPTYNNHLYKQISNGTSGGSTNDNTYFGYSTPWGYFDFNRFHCHFSPRDWQRLINNNWGFRPKRLSFKLFNIQVKEVTQNEGTKTIANNLTSTIQVFTDSEYQLPYVLGSAHQGCLPPFPADVFMIPQYGYLTLNNGSQAVGRSSFYCLEYFPSQMLRTGNNFSFSYTFEDVPFHSSYAHSQSLDRLMNPLIDQYLYYLSRTQSTGGTAGTQQLLFSQAGPSNMSAQARNWLPGPCYRQQRVSTTLSQNNNSNFAWTGATKYHLNGRDSLVNPGVAMATNKDDEDRFFPSSGILMFGKQGAGKDNVDYSNVMLTSEEEIKATNPVATEQYGVVADNLQQQNTAPIVGAVNSQGALPGMVWQNRDVYLQGPIWAKIPHTDGNFHPSPLMGGFGLKHPPPQILIKNTPVPADPPTAFNQAKLNSFITQYSTGQVSVEIEWELQKENSKRWNPEIQYTSNYYKSTNVDFAVNTEGVYSEPRPIGTRYLTRNL

SEQ ID NO: 454 - DNA, 2217 bp, Artificial Sequence
  Synthetic polynucleotide
atggctgccgatggttatcttccagattggctcgaggacaacctctctgagggcattcgcgagtggtgggacctgaaacctggagccccgaaacccaaagccaaccagcaaaagcaggacgacggccggggtctggtgcttcctggctacaagcacctcggacccttcaacggactcgacaagggggagcccgtcaacgcggcggacgcagcggccctcgagcacgacaaggcctacgaccagcagctcaaagcgggtgacaatccgtacctgcggtataatcacgctgacgccgagtttcaggagcgtctgcaagaagatacgtcttttgggggcaacctcgggcgagcagtcttccaggccaagaagcgggttctcgaacctctcggtctggttgaggaaggcgctaagacggctcctggaaagaagagaccggtagagccgtcaccacagcgttcccccgactcctccacgggcatcggcaagaaaggccagcagcccgccagaaagagactcaatttcggtcagactggcgactcagagtcagtccccgaccctcaacctatcggagaacctccagcagcgccctctagtgtgggatctggtacaatggctgcaggcggtggcgcaccaatggcagacaataacgaaggtgccgacggagtgggtagttcctcgggaaattggcattgcgattccacatggctgggcgacagagtcatcaccaccagcacccgaacctgggccctgcccacctacaacaaccacctctacaagcaaatctccaacgggacctcgggaggcagcaccaacgacaacacctactttggctacagcaccccctgggggtattttgactttaacagattccactgccacttctcaccacgtgactggcagcgactcatcaacaacaactggggattccggcccaagagactcagcttcaagctcttcaacatccaggtcaaagaggtcacgcagaatgaaggcaccaagaccatcgccaataaccttaccagcacggttcaggtcttttcggactcggaataccagctgccctacgtcctcggctccgcacaccagggctgcctgcctccgttcccggcggacgtcttcatgattccccagtacggctacctgactctgaacaatggcagccaatcggtgggtcgttcctctttctactgcctggaatatttcccttctcaaatgctgagaacgggcaacaacttcaccttcagctacaccttcgaggacgttcccttccacagcagctacgcacacagccagagcctggaccggctgatgaatcctcttatcgaccagtacctgtattacctggccagaacacagagcaacgcaggaggcacagctggcaatcgggaactgcagttttatcagggcgggcctaccaccatggccgaacaagccaaaaactggctgcctggaccttgcttccggcaacaaagagtctccaagacgctggatcaaaacaacaacagcaactttgcttggactggtgccaccaaataccatctaaatggaagaaattcattggttaatcccggtgtcgccatggcaacccacaaggacgacgaggaacgcttcttcccttcgagcggagtcctgatttttggaaaaactggagcagctaataagactacactggaaaatgtgttaatgacaaatgaagaggaaattcgtcctaccaacccggtagccaccgaggaatacgggactgttagcagcaacctgcaggcggctaacactgcagcccagacacaagttgtcaacaaccagggagccttacctggtatggtctggcagaaccgggacgtgtacctgcagggtcccatctgggccaagattcctcacacggacggcaactttcacccgtctccgctgatgggcggctttggactgaagcatccgcctcctcagatcctgatcaaaaacactcctgttcctgctaatcccccggaggtgtttacgcctgccaagtttgcttctttcatcacacagtacagcaccggccaggtcagcgtggagatcgagtgggagctgcagaaggagaacagcaagcgctggaacccagagattcagtatacctccaattttgacaaacagactggtgtggactttgccgttgacagccagggtgtttattctgagcctcgccccattggtactcgttacctcacccgtaatctgtaa

SEQ ID NO: 455 - protein, 738 aa, Artificial Sequence
  Synthetic polypeptide
MAADGYLPDWLEDNLSEGIREWWDLKPGAPKPKANQQKQDDGRGLVLPGYKHLGPFNGLDKGEPVNAADAAALEHDKAYDQQLKAGDNPYLRYNHADAEFQERLQEDTSFGGNLGRAVFQAKKRVLEPLGLVEEGAKTAPGKKRPVEPSPQRSPDSSTGIGKKGQQPARKRLNFGQTGDSESVPDPQPIGEPPAAPSSVGSGTMAAGGGAPMADNNEGADGVGSSSGNWHCDSTWLGDRVITTSTRTWALPTYNNHLYKQISNGTSGGSTNDNTYFGYSTPWGYFDFNRFHCHFSPRDWQRLINNNWGFRPKRLSFKLFNIQVKEVTQNEGTKTIANNLTSTVQVFSDSEYQLPYVLGSAHQGCLPPFPADVFMIPQYGYLTLNNGSQSVGRSSFYCLEYFPSQMLRTGNNFTFSYTFEDVPFHSSYAHSQSLDRLMNPLIDQYLYYLARTQSNAGGTAGNRELQFYQGGPTTMAEQAKNWLPGPCFRQQRVSKTLDQNNNSNFAWTGATKYHLNGRNSLVNPGVAMATHKDDEERFFPSSGVLIFGKTGAANKTTLENVLMTNEEEIRPTNPVATEEYGTVSSNLQAANTAAQTQVVNNQGALPGMVWQNRDVYLQGPIWAKIPHTDGNFHPSPLMGGFGLKHPPPQILIKNTPVPANPPEVFTPAKFASFITQYSTGQVSVEIEWELQKENSKRWNPEIQYTSNFDKQTGVDFAVDSQGVYSEPRPIGTRYLTRNL

SEQ ID NO: 456 - protein, 737 aa, Artificial Sequence
  Synthetic polypeptide
MAADGYLPDWLEDNLSEGIREWWDLKPGAPKPKANQQKQDDGRGLVLPGYKYLGPFNGLDKGEPVNAADAAALEHDKAYDQQLKAGDNPYLRYNHADAEFQERLQEDTSFGGNLGRAVFQAKKRVLEPLGLVEEAAKTAPGKKRPVEPSPQRSPDSSTGIGKKGQQPARKRLNFGQTGDSESVPDPQPIGEPPAGPSGLGSGTMAAGGGAPMADNNKGADGVGNASGNWHCDSTWLGDRVITTSTRTWALPTYNNHLYKQISSQSAGSTNDNVYFGYSTPWGYFDFNRFHCHFSPRDWQRLINSNWGFRPKKLNFKLFNIQVKEVTTNDGVTTIANNLTSTVQVFSDSEYQLPYVLGSAHQGCLPPFPADVFMIPQYGYLTLNNGSQSVGRSSFYCLEYFPSQMLRTGNNFTFSYTFEDVPFHSSYAHSQSLDRLMNPLIDQYLYYLARTQSNAGGTAGNRELQFYQGGPTTMAEQAKNWLPGPCFRQQRVSKTLDQNNNSNFAWTGATKYHLNGRNSLVNPGVAMATHKDDEERFFPSSGVLIFGKTGAANKTTLENVLMTNEEEIRPTNPVATEEYGTVSSNLQAANTAAQTQVVNNQGALPGMVWQNRDVYLQGPIWAKIPHTDGNFHPSPLMGGFGLKHPPPQILIKNTPVPANPPEVFTPAKFASFITQYSTGQVSVEIEWELQKENSKRWNPEIQYTSNFDKQTGVDFAVDSQGVYSEPRPIGTRYLTRNL

SEQ ID NO: 457 - protein, 737 aa, Artificial Sequence
  Synthetic polypeptide
MAADGYLPDWLEDNLSEGIREWWDLKPGAPKPKANQQKQDDGRGLVLPGYKYLGPFNGLDKGEPVNAADAAALEHDKAYDQQLKAGDNPYLRYNHADAEFQERLQEDTSFGGNLGRAVFQAKKRVLEPLGLVEEAAKTAPGKKRPVEPSPQRSPDSSTGIGKKGQQPARKRLNFGQTGDSESVPDPQPIGEPPAGPSGLGSGTMAAGGGAPMADNNEGADGVGNASGNWHCDSTWLGDRVITTSTRTWALPTYNNHLYKQISSQSAGSTNDNVYFGYSTPWGYFDFNRFHCHFSPRDWQRLINSNWGFRPKKLNFKLFNIQVKEVTTNDGVTTIANNLTSTVQVFSDSEYQLPYVLGSAHQGCLPPFPADVFMIPQYGYLTLNNGSQSVGRSSFYCLEYFPSQMLRTGNNFTFSYTFEDVPFHSSYAHSQSLDRLMNPLIDQYLYYLARTQSNAGGTAGNRELQFYQGGPTTMAEQAKNWLPGPCFRQQRVSKTLDQNNNSNFAWTGATKYHLNGRNSLVNPGVAMATHKDDEERFFPSSGVLIFGKTGAANKTTLENVLMTNEEEIRPTNPVATEEYGTVSSNLQAANTAAQTQVVNNQGALPGMVWQNRDVYLQGPIWAKIPHTDGNFHPSPLMGGFGLKHPPPQILIKNTPVPANPPEVFTPAKFASFITQYSTGQVSVEIEWELQKENSKRWNPEIQYTSNFDKQTGVDFAVDSQGVYSEPRPIGTRYLTRNL

SEQ ID NO: 458 - protein, 737 aa, Artificial Sequence
  Synthetic polypeptide
MAADGYLPDWLEDNLSEGIREWWDLKPGAPKPKANQQKQDDGRGLVLPGYKYLGPFNGLDKGEPVNAADAAALEHDKAYDQQLKAGDNPYLRYNHADAEFQERLQEDTSFGGNLGRAVFQAKKRVLEPLGLVEEAAKTAPGKKRPVEPSPQRSPDSSTGIGKKGQQPARKRLNFGQTGDSESVPDPQPIGEPPAGPSGLGSGTMAAGGGAPMADNNEGADGVGNASGNWHCDSTWLGDRVITTSTRTWALPTYNNHLYKQISSQSAGSTNDNVYFGYSTPWGYFDFNRFHCHFSPRDWQRLINNNWGFRPKKLNFKLFNIQVKEVTTNDGVTTIANNLTSTVQVFSDSEYQLPYVLGSAHQGCLPPFPADVFMIPQYGYLTLNNGSQSVGRSSFYCLEYFPSQMLRTGNNFTFSYTFEDVPFHSSYAHSQSLDRLMNPLIDQYLYYLARTQSNAGGTAGNRELQFYQGGPTTMAEQAKNWLPGPCFRQQRVSKTLDQNNNSNFAWTGATKYHLNGRNSLVNPGVAMATHKDDEERFFPSSGVLIFGKTGAANKTTLENVLMTNEEEIRPTNPVATEEYGTVSSNLQAANTAAQTQVVNNQGALPGMVWQNRDVYLQGPIWAKIPHTDGNFHPSPLMGGFGLKHPPPQILIKNTPVPANPPEVFTPAKFASFITQYSTGQVSVEIEWELQKENSKRWNPEIQYTSNFDKQTGVDFAVDSQGVYSEPRPIGTRYLTRNL

SEQ ID NO: 459 - protein, 737 aa, Artificial Sequence
  Synthetic polypeptide
MAADGYLPDWLEDNLSEGIREWWDLKPGAPKPKANQQKQDDGRGLVLPGYKYLGPFNGLDKGEPVNAADAAALEHDKAYDQQLKAGDNPYLRYNHADAEFQERLQEDTSFGGNLGRAVFQAKKRVLEPLGLVEEAAKTAPGKKRPVEPSPQRSPDSSTGIGKKGQQPARKRLNFGQTGDSESVPDPQPIGEPPAGPSGLGSGTMAAGGGAPMADNNKGADGVGNASGNWHCDSTWLGDRVITTSTRTWALPTYNNHLYKQISSQSAGSTNDNVYFGYSTPWGYFDFNRFHCHFSPRDWQRLINNNWGFRPKKLNFKLFNIQVKEVTTNDGVTTIANNLTSTVQVFSDSEYQLPYVLGSAHQGCLPPFPADVFMIPQYGYLTLNNGSQSVGRSSFYCLEYFPSQMLRTGNNFTFSYTFEDVPFHSSYAHSQSLDRLMNPLIDQYLYYLARTQSNAGGTAGNRELQFYQGGPTTMAEQAKNWLPGPCFRQQRVSKTLDQNNNSNFAWTGATKYHLNGRNSLVNPGVAMATHKDDEERFFPSSGVLIFGKTGAANKTTLENVLMTNEEEIRPTNPVATEEYGTVSSNLQAANTAAQTQVVNNQGALPGMVWQNRDVYLQGPIWAKIPHTDGNFHPSPLMGGFGLKHPPPQILIKNTPVPANPPEVFTPAKFASFITQYSTGQVSVEIEWELQKENSKRWNPEIQYTSNFDKQTGVDFAVDSQGVYSEPRPIGTRYLTRNL

SEQ ID NO: 460 - DNA, 2214 bp, Artificial Sequence
  Synthetic polynucleotide
atggctgctgacggttatcttccagattggctcgaggacaacctctctgagggcattcgcgagtggtgggacctgaaacctggagcccccaagcccaaggccaaccagcagaagcaggacgacggccggggtctggtgcttcctggctacaagtacctcggacccttcaacggactcgacaagggggagcccgtcaacgcggcggacgcagcggccctcgagcacgacaaggcctacgaccagcagctcaaagcgggtgacaatccgtacctgcggtataaccacgccgacgccgagtttcaggagcgtctgcaagaagatacgtcttttgggggcaacctcgggcgagcagtcttccaggccaagaagcgggttctcgaacctctcggtctggttgaggaagctgctaagacggctcctggaaagaagagaccggtagaaccgtcacctcagcgttcccccgactcctccacgggcatcggcaagaaaggccagcagcccgctagaaagagactgaactttgggcagactggcgactcagagtcagtccccgaccctcaaccaatcggagaaccaccagcaggcccctctggtctgggatctggtacaatggctgcaggcggtggcgcaccaatggctgacaataacaagggcgccgacggagtgggtaatgcctcaggaaattggcattgcgattccacatggctgggcgacagagtcatcaccaccagcacccgaacctgggctttgcccacctacaacaaccacctctacaagcaaatctccagtcagtcagcaggtagcaccaacgacaacgtctacttcggctacagcaccccctgggggtattttgacttcaacagattccactgtcacttctcaccacgtgactggcagcggctcatcaacagcaactggggattccggcccaagaagctcaacttcaagctgttcaacatccaggtcaaggaggtcacaacgaatgacggcgtcacgaccatcgccaataaccttaccagcacggttcaggtcttttcggactcggaataccagctgccctacgtcctcggctccgcacaccagggctgcctgcctccgttcccggcggacgtcttcatgattccccagtacggctacctgactctgaacaatggcagccaatcggtgggtcgttcctctttctactgcctggaatatttcccttctcaaatgctgagaacgggcaacaacttcaccttcagctacaccttcgaggacgttcccttccacagcagctacgcacacagccagagcctggaccggctgatgaatcctcttatcgaccagtacctgtattacctggccagaacacagagcaacgcaggaggcacagctggcaatcgggaactgcagttttatcagggcgggcctaccaccatggccgaacaagccaaaaactggctgcctggaccttgcttccggcaacaaagagtctccaagacgctggatcaaaacaacaacagcaactttgcttggactggtgccaccaaataccatctaaatggaagaaattcattggttaatcccggtgtcgccatggcaacccacaaggacgacgaggaacgcttcttcccttcgagcggagtcctgatttttggaaaaactggagcagctaataagactacactggaaaatgtgttaatgacaaatgaagaggaaattcgtcctaccaacccggtagccaccgaggaatacgggactgttagcagcaacctgcaggcggctaacactgcagcccagacacaagttgtcaacaaccagggagccttacctggtatggtctggcagaaccgggacgtgtacctgcagggtcccatctgggccaagattcctcacacggacggcaactttcacccgtctccgctgatgggcggctttggactgaagcatccgcctcctcagatcctgatcaaaaacactcctgttcctgctaatcccccggaggtgtttacgcctgccaagtttgcttctttcatcacacagtacagcaccggccaggtcagcgtggagatcgagtgggagctgcagaaggagaacagcaagcgctggaacccagagattcagtatacctccaattttgacaaacagactggtgtggactttgccgttgacagccagggtgtttattctgagcctcgccccattggtactcgttacctcacccgtaatctgtaa

SEQ ID NO: 461 - DNA, 2217 bp, Artificial Sequence
  Synthetic polynucleotide
atggctgccgatggttatcttccagattggctcgaggacaacctctctgagggcattcgcgagtggtgggacctgaaacctggagccccgaaacccaaagccaaccagcaaaagcaggacgacggccggggtctggtgcttcctggctacaagtacctcggacccttcaacggactcgacaagggggagcccgtcaacgcggcggacgcagcggccctcgagcacgacaaggcctacgaccagcagctcaaagcgggtgacaatccgcacctgcggtataatcacgccgacgccgagtttcaggagcgtctgcaagaagatacgtcttttgggggcaacctcgggcgagcagtcttccaggccaagaagcgggttctcgaacctctcggtctggttgaggaaggcgctaagacggctcctggaaagaagagaccggtagagccgtcaccacagcgttcccccgactcctccacgggcatcggcaagaaaggccagcagcccgccagaaagagactcaatttcggtcagactggcgactcagagtcagtccccgaccctcaacttatcggagaacctccagcagcgccctctagtgtgggatctggtacaatggctgcaggcggtggcgcaccaatggcagacaataacgaaggtgccgacggagtgggtagttcctcgggaaattggcattgcgattccacatggctgggcgacagagtcatcaccaccagcacccgaacctgggccctgcccacctacaacaaccacctctacaagcaaatctccaacgggacctcgggaggcagcaccaacgacaacacctactttggctacagcaccccctgggggtattttgactttaacagattccactgccacttctcaccacgtgactggcagcgactcatcaacaacaactggggattccggcccaagagactcagcttcaagctcttcaacatccaggtcaaagaggtcacgcagaatgaaggcaccaagaccatcgccaataacctcaccagcaccatccaggtgtttacggactcggagtaccagctgccgtacgtcctcggctctgcccaccagggctgcctgcctccgttcccggcggacgtcttcatgattcctcagtacggcaacctgactctcaacaacggtagtcaggccgtgggacgttcctccttctactgcctggagtacttcccctctcagatgctgagaacgggcaacaacttttccttcagctacactttcgaggacgtgcctttccacagcagctacgcgcacagccagagtttggacaggctgatgaatcctctcatcgaccagtacctgtactacctgtcaagaacccagtctacgggaggcacagcgggaacccagcagttgctgttttctcaggccgggcctagcaacatgtcggctcaggccagaaactggctgcctggaccctgctacagacagcagcgcgtctccacgacactgtcgcaaaacaacaacagcaactttgcctggactggtgccaccaagtatcatctgaacggcagagactctctggtgaatccgggcgtcgccatggcaaccaacaaggacgacgaggaccgcttcttcccatccagcggcatcctcatgtttggcaagcagggagctggaaaagacaacatgggctatagcaacgtgatgctaaccagcgaggaagaaatcaagaccaccaaccccgtggccacagaacagtatggcgtggtggctgataacctacagcagcaaaacaccgctcctattgtgggggccgtcaacagccagggagccttacctggcatggtctggcagaaccgggacgtgtacctgcagggtcctatttgggccaagattcctcacacagatggcaactttcacccgtctcctttaatgggcggctttggacttaaacatccgcctcctcagatcctcatcaaaaacactcctgttcctgcggatcctccaacagcgttcaaccaggccaagctgaattctttcatcacgcagtacggcaccggacaagtcagcgtggagatcgagtgggagctgcagaaggagaacagcaagcgctggaacccagagattcagtatacttccaactactacaaatctacaaatgtggactttgctgttaatactgagggtgtttactctgagcctcgccccattggcactcgttacctcacccgtaatctgtaa

SEQ ID NO: 462 - protein, 738 aa, Artificial Sequence
  Synthetic polypeptide
MAADGYLPDWLEDNLSEGIREWWDLKPGAPKPKANQQKQDDGRGLVLPGYKYLGPFNGLDKGEPVNAADAAALEHDKAYDQQLKAGDNPHLRYNHADAEFQERLQEDTSFGGNLGRAVFQAKKRVLEPLGLVEEGAKTAPGKKRPVEPSPQRSPDSSTGIGKKGQQPARKRLNFGQTGDSESVPDPQLIGEPPAAPSSVGSGTMAAGGGAPMADNNEGADGVGSSSGNWHCDSTWLGDRVITTSTRTWALPTYNNHLYKQISNGTSGGSTNDNTYFGYSTPWGYFDFNRFHCHFSPRDWQRLINNNWGFRPKRLSFKLFNIQVKEVTQNEGTKTIANNLTSTIQVFTDSEYQLPYVLGSAHQGCLPPFPADVFMIPQYGNLTLNNGSQAVGRSSFYCLEYFPSQMLRTGNNFSFSYTFEDVPFHSSYAHSQSLDRLMNPLIDQYLYYLSRTQSTGGTAGTQQLLFSQAGPSNMSAQARNWLPGPCYRQQRVSTTLSQNNNSNFAWTGATKYHLNGRDSLVNPGVAMATNKDDEDRFFPSSGILMFGKQGAGKDNMGYSNVMLTSEEEIKTTNPVATEQYGVVADNLQQQNTAPIVGAVNSQGALPGMVWQNRDVYLQGPIWAKIPHTDGNFHPSPLMGGFGLKHPPPQILIKNTPVPADPPTAFNQAKLNSFITQYGTGQVSVEIEWELQKENSKRWNPEIQYTSNYYKSTNVDFAVNTEGVYSEPRPIGTRYLTRNL

SEQ ID NO: 463 - DNA, 2217 bp, Artificial Sequence
  Synthetic polynucleotide
atggctgccgatggttatcttccagattggctcgaggacaacctctctgagggcattcgcgagtggtgggacctgaaacctggagccccgaaacccaaagccaaccagcaaaagcaggacgacggccggggtctggtgcttcctggctacaagtacctcggacccttcaacggactcgacaagggggagcccgtcaacgcggcggacgcagcggccctcgagcacgacaaggcctacgaccagcagctcaaagcgggtgacaatccgtacctgcggtataatcacgccgacgccgagtttcaggagcgtctgcaagaagatacgtcttttgggggcaacctcgggcgagcagtcttccaggccaagaagcgggttctcgaacctctcggtctggttgaggaaggcgctaagacggctcctggaaagaagagaccggtagagccgtcaccacagcgttcccccgactcctccacgggcatcggcaagaaaggccagcagcccgccggaaagagactcaatttcggtcagactggcgactcagagtcagtccccgaccctcaacctatcggagaacctccagcagcgccctctagtgtgggatctggtacaatggctgcaggcggtggcgcaccaatggcagacaataacgaaggtgccgacggagtgggtagttcctcgggaaattggcattgcgattccacatggctgggcgacagagtcatcaccaccagcacccgaacctgggccctgcccacctacaacaaccacctctacaagcaaatctccaacgggacctcgggaggcagcaccaacgacaacacctactttggctacagcaccccctgggggtattttgactttaacagattccactgccacttctcaccacgtgactggcagcgactcatcaacaacaactggggattccggcccaagagactcagcttcaagctcttcaacatccaggtcaaagaggtcacgcagaatgaaggcaccaagaccatcgccaataacctcaccagcaccatccaggtgtttacggactcggaataccagctgccgtacgtcctcggctctgcccaccagggctgcctgcctccgttcccggcggacgtcttcatgattcctcagtacggctacctgactctcaacaacggtagtcaggccgtgggacgttcctccttctactgcctggagtacttcccctctcagatgctgagaacgggcaacaacttttccttcagctacactttcgaggacgtgcctttccacagcagctacgcgcacagccagagtttggacaggctgatgaatcctctcgtcgaccagtacctgtactacctgtcaagaacccagtctacgggaggcacagcgggaacccagcagttgctgttttctcaggccgggcctagcaacatgtcggctcaggccagaaactggctgcctggaccctgctacagacagcagcgcgtctccacgacactgtcgcaaaacaacaacagcaactttgcctggactggtgccaccaagtatcatctgaacggcagagactctctggtgaatccgggcgtcgccatggcaaccaacaaggacgacgaggaccgcttcttcccatccagcggcatcctcatgtttggcaagcagggagctggaaaagacaacgtggactatagcaacgtgatgctaaccagcgaggaagaaatcaagaccaccaaccccgtggccacagaacagtatggcgtggtggctgataacctacagcagcaaaacaccgctcctattgtgggggccgtcaacagccagggagccttacctggcatggtctggcagaaccgggacgtgtacctgcagggtcctatttgggccaagattcctcacacagatggcaactttcacccgtctcctttaatgggcggctttggacttaaacatccgcctcctcagatcctcatcaaaaacactcctgttcctgcggatcctccaacagcgttcaaccaggccaagctgaattctttcatcacgcagtacagcaccggacaagtcagcgtggagatcgagtgggagctgcagaaggagaacagcaagcgctggagcccagagattcagtatacttccaactactacaaatctacaaatgtggactttgctgttaatactgagggtgtttactctgagcctcgccccattggcactcgttacctcacccgtaatctgtaa

SEQ ID NO: 464 - protein, 738 aa, Artificial Sequence
  Synthetic polypeptide
MAADGYLPDWLEDNLSEGIREWWDLKPGAPKPKANQQKQDDGRGLVLPGYKYLGPFNGLDKGEPVNAADAAALEHDKAYDQQLKAGDNPYLRYNHADAEFQERLQEDTSFGGNLGRAVFQAKKRVLEPLGLVEEGAKTAPGKKRPVEPSPQRSPDSSTGIGKKGQQPAGKRLNFGQTGDSESVPDPQPIGEPPAAPSSVGSGTMAAGGGAPMADNNEGADGVGSSSGNWHCDSTWLGDRVITTSTRTWALPTYNNHLYKQISNGTSGGSTNDNTYFGYSTPWGYFDFNRFHCHFSPRDWQRLINNNWGFRPKRLSFKLFNIQVKEVTQNEGTKTIANNLTSTIQVFTDSEYQLPYVLGSAHQGCLPPFPADVFMIPQYGYLTLNNGSQAVGRSSFYCLEYFPSQMLRTGNNFSFSYTFEDVPFHSSYAHSQSLDRLMNPLVDQYLYYLSRTQSTGGTAGTQQLLFSQAGPSNMSAQARNWLPGPCYRQQRVSTTLSQNNNSNFAWTGATKYHLNGRDSLVNPGVAMATNKDDEDRFFPSSGILMFGKQGAGKDNVDYSNVMLTSEEEIKTTNPVATEQYGVVADNLQQQNTAPIVGAVNSQGALPGMVWQNRDVYLQGPIWAKIPHTDGNFHPSPLMGGFGLKHPPPQILIKNTPVPADPPTAFNQAKLNSFITQYSTGQVSVEIEWELQKENSKRWSPEIQYTSNYYKSTNVDFAVNTEGVYSEPRPIGTRYLTRNL

SEQ ID NO: 465 - DNA, 2217 bp, Artificial Sequence
  Synthetic polynucleotide
atggttgccgatggttatcttccagattggctcgaggacaacctctctgagggcattcgcgagtggtgggacctgaaacctggagccccgaaacccaaagccaaccagcaaaagcagggcgacggccggggtctggtgcttcctggctacaagtacctcggacccttcaacggactcgacaagggggagcccgtcaacgcggcggacgcagcggccctcgagcacgacaaggcctacgaccagcagcttaaagcgggtgacaatccgtacctgcggtataatcacgccgacgccgagcttcaggagcgtctgcaagaagatacgtcttttgggggcaacctcgggcgagcagtcttccaggccaagaagcgggttctcgaacctctcggtctggttgaggaaggcgctaagacggctcctggaaagaagagaccggtagagccgtcaccacagcgttcccccgactcctccacgggcatcggcaagaaaggccagcagcccgccagaaagagactcaatttcggtcagactggcgactcagagtcagtccccgaccctcaacctatcggagaacctccagcagcgccctctagtgtgggatctggtacaatggctgcaggcggtggcgcgccaatggcagacaataacgaaggtgccgacggagtgggtagttcctcgggaaattggcattgcgattccacatggctgggcgacagagtcatcaccaccagcacccgaacctgggccctgcccacctacaacaaccacctctacaagcaaatctccaacgggacctcgggaggcagcaccaacgacaacacctactttggctacagcaccccctgggggtattttgactttaacagattccactgccacttctcaccacgtgactggcagcgactcatcaacaacaactggggattccggcccaagagactcagcttcaagctcttcaacatccaggtcaaagaggtcacgcagaatgaaggcaccaagaccatcgccaataacctcaccagcaccatccaggtgtttacggactcggaataccagctgccgtacgtcctcggctctgcccaccagggctgccagcctccgttcccggcggacgtcttcatgattcctcagtacggctacctgactctcaacaacggtagtcaggccgtgggacgttcctccttctactgcctggagtacttcccctctcagatgctgagaacgggcaacaacttttccttcagctacactttcgaggacgtgcctttccacagcagctacgcgcacagccagagtttggacaggctgatgaatcctctcatcgaccagtacctgtactacctgtcaagaacccagtctacgggaggcacagcgggaacccagcagttgctgttttctcaggccgggcctagcaacatgtcggctcaggccagaaactggctgcctggaccctgctacagacagcagcgcgtctccacgacactgtcgcaaaacaacaacagcaactttgcctggactggtgccaccaagtatcatctgaacggcagagactctctggtgaatccgggcgtcgccatggcaaccaacaaggacgacgaggaccgcttcttcccatccagcggcatcctcatgtttggcaagcagggagctggaaaagacaacgtggactatagcaacgtgatgctaaccagcgaggaagaaatcaagaccaccaaccccgtggccacagaacagtatggcgtggtggctgataacctacagcagcaaaacaccgctcctattgtgggggccgtcaacagccagggagccttacctggcatggtctggcagaaccgggacgtgtacctgcagggtcctatttgggccaagattcctcacacagatggcaactttcacccgtctcctttaatgggcggctttggacttaaacatccgcctcctcagatcctcatcaaaaacactcctgttcctgcggatcctccaacagcgttcaaccaggccaagctgaattctttcatcacgcagtacagcaccggacaagtcagcgtggagatcgagtgggagccgcagaaggagaacagcaagcgctggaacccagagattcagtatacttccaactactacaaatctacaaatgtggactttgctgttaatactgagggtgtttactctgagcctcgccccattggcactcgttacctcacccgtaatctgtaa

SEQ ID NO: 466 - protein, 738 aa, Artificial Sequence
  Synthetic polypeptide
MVADGYLPDWLEDNLSEGIREWWDLKPGAPKPKANQQKQGDGRGLVLPGYKYLGPFNGLDKGEPVNAADAAALEHDKAYDQQLKAGDNPYLRYNHADAELQERLQEDTSFGGNLGRAVFQAKKRVLEPLGLVEEGAKTAPGKKRPVEPSPQRSPDSSTGIGKKGQQPARKRLNFGQTGDSESVPDPQPIGEPPAAPSSVGSGTMAAGGGAPMADNNEGADGVGSSSGNWHCDSTWLGDRVITTSTRTWALPTYNNHLYKQISNGTSGGSTNDNTYFGYSTPWGYFDFNRFHCHFSPRDWQRLINNNWGFRPKRLSFKLFNIQVKEVTQNEGTKTIANNLTSTIQVFTDSEYQLPYVLGSAHQGCQPPFPADVFMIPQYGYLTLNNGSQAVGRSSFYCLEYFPSQMLRTGNNFSFSYTFEDVPFHSSYAHSQSLDRLMNPLIDQYLYYLSRTQSTGGTAGTQQLLFSQAGPSNMSAQARNWLPGPCYRQQRVSTTLSQNNNSNFAWTGATKYHLNGRDSLVNPGVAMATNKDDEDRFFPSSGILMFGKQGAGKDNVDYSNVMLTSEEEIKTTNPVATEQYGVVADNLQQQNTAPIVGAVNSQGALPGMVWQNRDVYLQGPIWAKIPHTDGNFHPSPLMGGFGLKHPPPQILIKNTPVPADPPTAFNQAKLNSFITQYSTGQVSVEIEWEPQKENSKRWNPEIQYTSNYYKSTNVDFAVNTEGVYSEPRPIGTRYLTRNL

SEQ ID NO: 467 - DNA, 2217 bp, Artificial Sequence
  Synthetic polynucleotide
atggctgccgatggttatcttccagattggctcgaggacaacctctctgagggcattcgcgagtggtgggacctgaaacctggagccccgaaacccaaagccaaccagcaaaagcaggacgacggccggggtctggtgcttcctggctacaagtacctcggacccttcaacggactcgacaagggggagcccgtcaacgcggcggacgcagcggccctcgagcacgacaaggcctacgaccagcagctcaaagcgggtgacaatccgtacctgcggtataatcacgccgacgccgagtttcaggagcgtctgcaagaagatacgtcttttgggggcaacctcgggcgagcagtcttccaggccaagaagcgggttctcgaacctctcggtctggttgaggaaggcgctaagacggctcctggaaagaagagaccggtagagccgtcaccacagcgttcccccgactcctccacgggcatcggcaagaaaggccagcagcccgccagaaagagactcaatttcggtcagactggcgactcagagtcagtccccgaccctcaacctatcggagaacctccagcagcgccctctagtgtgggatctggtacaatggctgcaggcggtggcgcaccaatggcagacaataacgaaggtgccgacggagtgggtagttcctcgggaaattggcattgcgattccacatggctgggcgacagagtcatcaccaccagcacccgaacctgggccctgcccacctacaacaaccacctctacaagcaaatctccaacgggacctcgggaggcagcaccaacgacaacacctactttggctacagcaccccctgggggtattttgactttaacagattccactgccacttctcaccacgtgactggcagcgactcatcaacaacaactggggattccggcccaagagactcagcttcaagctcttcaacatccaggtcaaagaggtcacgcagaatgaaggcaccaagaccatcgccaatagcctcaccagcaccatccaggtgtttacggactcggaataccagctgccgtacgtcctcggctctgcccaccagggctgcctgcctccgttcccggcggacgtcttcatgattcctcagtacggctacctgactcccaacaacggtagtcaggccgtgggacgttcctccttctactgcctggagtacttcccctctcagatgctgagaacgggcaacaacttttccttcagctacactttcgaggacgtgcctttccacagcagctacgcgcacagccagagtttggacaggctgatgaatcctctcatcgaccagtacctgtactacctgtcaagaacccagtctacgggaggcacagcgggaacccagcagttgctgtcttctcaggccgggcctagcaacatgtcggctcaggccagaaactggctgcctggaccctgctacagacagcagcgcgtctccacgacactgtcgcaaaacaacaacagcaactttgcctggactggtgccaccaagtatcatctgaacggcagagactctctggtgaatccgggcgtcgccatggcaaccaacaaggacgacgaggaccgcttcttcccatccagcggcatcctcatgtttggcaagcagggagctggaaaagacaacgtggactatagcaacgtgatgctaaccagcgaggaagaaatcaagaccaccaaccccgtggccacagaacagtatggcgtggtggctgataacctacagcagcaaaacaccgctcctattgtgggggccgtcaacagccagggagccttacctggcatggtctggcagaaccgggacgtgtacttgcagggtcctatttgggccaagattcctcacacagatggcaactttcacccgtctcctttaatgggcggctttggacttaaacatccgcctcctcagatcctcatcaaaaacactcctgttcctgcggatcctccaacagcgttcaaccaggccaagctgaattctttcatcacgcagtacagcaccggacaagtcagcgtggagatcgagtgggagctgcagaaggagaacagcaagcgctggaacccagagattcagtatacttccaactactacaaatctacaaatgtggactttgctgttaatactgagggtgtttactctgagcctcgccccattggcactcgttacctcacccgtaatctgtaa

SEQ ID NO: 468 - protein, 738 aa, Artificial Sequence
  Synthetic polypeptide
MAADGYLPDWLEDNLSEGIREWWDLKPGAPKPKANQQKQDDGRGLVLPGYKYLGPFNGLDKGEPVNAADAAALEHDKAYDQQLKAGDNPYLRYNHADAEFQERLQEDTSFGGNLGRAVFQAKKRVLEPLGLVEEGAKTAPGKKRPVEPSPQRSPDSSTGIGKKGQQPARKRLNFGQTGDSESVPDPQPIGEPPAAPSSVGSGTMAAGGGAPMADNNEGADGVGSSSGNWHCDSTWLGDRVITTSTRTWALPTYNNHLYKQISNGTSGGSTNDNTYFGYSTPWGYFDFNRFHCHFSPRDWQRLINNNWGFRPKRLSFKLFNIQVKEVTQNEGTKTIANSLTSTIQVFTDSEYQLPYVLGSAHQGCLPPFPADVFMIPQYGYLTPNNGSQAVGRSSFYCLEYFPSQMLRTGNNFSFSYTFEDVPFHSSYAHSQSLDRLMNPLIDQYLYYLSRTQSTGGTAGTQQLLSSQAGPSNMSAQARNWLPGPCYRQQRVSTTLSQNNNSNFAWTGATKYHLNGRDSLVNPGVAMATNKDDEDRFFPSSGILMFGKQGAGKDNVDYSNVMLTSEEEIKTTNPVATEQYGVVADNLQQQNTAPIVGAVNSQGALPGMVWQNRDVYLQGPIWAKIPHTDGNFHPSPLMGGFGLKHPPPQILIKNTPVPADPPTAFNQAKLNSFITQYSTGQVSVEIEWELQKENSKRWNPEIQYTSNYYKSTNVDFAVNTEGVYSEPRPIGTRYLTRNL

SEQ ID NO: 469 - protein, 738 aa, Artificial Sequence
  Synthetic polypeptide
MAADGYLPDWLEDNLSEGIREWWDLKPGAPKPKANQQKQDDGRGLVLPGYKYLGPFNGLDKGEPVNAADAAALEHDKAYDQQLKAGDNPYLRYNHADAEFQERLQEDTSFGGNLGRAVFQAKKRVLEPLGLVEEGAKTAPGKKRPVEPSPQRSPDSSTGIGKKGQQPARKRLNFGQTGDSESVPDPQPIGEPPAAPSSVGSGTMAAGGGAPMADNNEGADGVGSSSGNWHCDSTWLGDRVITTSTRTWALPTYNNHLYKQISNGTSGGSTNDNTYFGYSTPWGYFDFNRFHCHFSPRDWQRLINNNWGFRPKRLSFKLFNIQVKEVTQNEGTKTIANNLTSTIQVFTDSEYQLPYVLGSAHQGCLPPFPADVFMIPQYGYLTLNNGSQAVGRSSFYCLEYFPSQMLRTGNNFSFSYTFEDVPFHSSYVHSQSLDRLMNPLIDQYLYYLSRTQSTGGTAGTQQLLFSQAGPSNMSAQARNWLPGPCYRQQRVSTTLSQNNNSNFAWTGATKYHLNGRDSLVNSGVAMATNKDDEDRFFPSSGILMFGKQGAGKDNVDYSNVMLTSEEEIKTTNPVATEQYGVVADNLQQQNTAPIVGAVNSQGALPGMVWQNRDVYLQGPIWAKIPHTDGNFHPSPLMGGFGLKHPPPQILIKNTPVPADPPTAFNQAKLNSFITQYSTGQVSVEIEWELQKENSKRWNPEIQYTSNYYKSTNVDFAVNTEGVYSEPRPIGTRYPTRNL

SEQ ID NO: 470 - DNA, 2217 bp, Artificial Sequence
  Synthetic polynucleotide
atggctgccgatggttatcttccagattggctcgaggacaacctctctgagggcattcgcgagtggtgggacctgaaacctggagccccgaaacccaaagccaaccagcaaaagcaggacgacggccggggtctggtgcttcctggctacaagtacctcggacccttcaacggactcgacaagggggagcccgtcaacgcggcggacgcagcggccctcgagcacgacaaggcctacgaccagcagctcaaagcgggtgacaatccgtacctgcggtataatcacgccgacgccgagtttcaggagcgtctgcaagaagatacgtcttttgggggcaacctcgggcgagcagtcttccaggccaagaagcgggttctcgaacctctcggtctggttgaggaaggcgctaagacggctcctggaaagaagagaccggtagagccgtcaccacagcgttcccccgactcctccacgggcatcggcaagaaaggccagcagcccgccagaaagagactcaatttcggtcagactggcgactcagagtcagtccccgaccctcaacctatcggagaacctccagcagcgccctctagtgtgggatctggtacaatggctgcaggcggtggcgcaccaatggcagacaataacgaaggtgccgacggagtgggtagttcctcgggaaattggcattgcgattccacatggctgggcgacagagtcatcaccaccagcacccgaacctgggccctgcccacctacaacaaccacctctacaagcaaatctccaacgggacctcgggaggcagcaccaacgacaacacctactttggctacagcaccccctgggggtattttgactttaacagattccactgccacttctcaccacgtgactggcagcgactcatcaacaacaactggggattccggcccaagagactcagcttcaagctcttcaacatccaggtcaaagaggtcacgcagaatgaaggcaccaagaccatcgccaataacctcaccagcaccatccaggtgtttacggactcggaataccagctgccgtacgtcctcggctctgcccaccagggctgcctgcctccgttcccggcggacgtcttcatgattcctcagtacggctacctgactctcaacaacggtagtcaggccgtgggacgttcctccttctactgcctggagtacttcccctctcagatgctgagaacgggcaacaacttttccttcagctacactttcgaggacgtgcctttccacagcagctacgtgcacagccagagtttggacaggctgatgaatcctctcatcgaccagtacctgtactacctgtcaagaacccagtctacgggaggcacagcgggaacccagcagttgctgttttctcaggccgggcctagcaacatgtcggctcaggccagaaactggctgcctggaccctgctacagacagcagcgcgtctccacgacactgtcgcaaaacaacaacagcaactttgcctggactggtgccaccaagtatcatctgaacggcagagactctctggtgaattcgggcgtcgccatggcaaccaacaaggacgacgaggaccgcttcttcccatccagcggcatcctcatgtttggcaagcagggagctggaaaagacaacgtggactatagcaacgtgatgctaaccagcgaggaagaaatcaagaccaccaaccccgtggccacagaacagtatggcgtggtggctgataacctacagcagcaaaacaccgctcctattgtgggggccgtcaacagccagggagccttacctggcatggtctggcagaaccgggacgtgtacctgcagggtcctatttgggccaagattcctcacacagatggcaactttcacccgtctcctttaatgggcggctttggacttaaacatccgcctcctcagatcctcatcaaaaacactcctgttcctgcggatcctccaacagcgttcaaccaggccaagctgaattctttcatcacgcagtacagcaccggacaagtcagcgtggagatcgagtgggagctgcagaaggagaacagcaagcgctggaacccagagattcagtatacttccaactactacaaatctacaaatgtggactttgctgttaatactgagggtgtttactctgagcctcgccccattggcactcgttaccccacccgtaatctgtaa

SEQ ID NO: 471 - protein, 734 aa, Artificial Sequence; identical to SEQ ID NO: 296
  Synthetic polypeptide

SEQ ID NO: 472 - DNA, 2214 bp, Artificial Sequence
  Synthetic polynucleotide
atggctgctgacggttatcttccagattggctcgaggacaacctctctgagggcattcgcgagtggtgggacctgaaacctggagccccgaaacccaaagccaaccagcagaagcaggacgacggccggggtctggtgcttcctggctacaagtacctcggacccttcaacggactcgacaagggggagcccgtcaacgcggcggacgcagcggccctcgagcacgacaaggcctacgaccagcagctcaaagcgggtgacaatccgtacctgcggtataaccacgccgacgccgagtttcaggagcgtctgcaagaagatacgtcttttgggggcaacctcgggcgagcagtcttccaggccaagaagcgggttctcgaacctctcggtctggttgaggaagctgctaagacggctcctggaaagaagagaccggtagaaccgtcacctcagcgttcccccgactcctccacgggcatcggcaagaaaggccagcagcccgctagaaagagactgaactttgggcagactggcgactcagagtcagtccccgaccctcaacctctcggagaaccaccagcaggcccctctggtctgggatctggtacaatggctgcaggcggtggcgctccaatggcagacaataacgaaggcgccgacggagtgggtaatgcctcaggaaattggcattgcgattccacatggctgggcgacagagtcatcaccaccagcacccgaacctgggctttgcccacctacaacaaccacctctacaagcaaatctccagtcagtcagcaggtagcaccaacgacaacgtctacttcggctacagcaccccctgggggtattttgacttcaacagattccactgtcacttctcaccacgtgactggcagcgactcatcaacaacaactggggattccggcccaagaagctcaacttcaagctcttcaacatccaagtcaaggaggtcacgacgaatgacggcgtcacgaccatcgctaataaccttaccagcacggttcaggtcttttcggactcggagtaccagctgccgtacgtcctcggctctgcccaccagggctgcctgcctccgttcccggcggacgtcttcatgattcctcagtacggctacctgactctgaacaatggcagccaatcggtgggacgttcatccttctactgcctggaatacttcccttctcaggtgctgagaacgggtaacaacttcaccttcagttacaccttcgaggacgtgcctttccacagcagctacgcgcacagccagagcctagaccggctgatgaatcccctcatcgaccagtacctgtattacctggctagaacacagagtaacccaggaggcacatctggcaatcgggaactgcagttttaccagggcgggccttccaccatggccgaacaagccaagaactggttacctggaccttgcttccggcaacaaagagtttccaaaacactggatcaaaacaacaacagcaactttgcttggactggtgccaccaaatatcacctgaacggcagaaactcattggtgaatcctggtgtcgccatggcaactcacaaggacgacgaggaccgctttttcccatccagcggagtcctgatttttggaaaaactggagcaaccaacaagactacattggaaaacgtgttaatgacaaatgaagaagaaattcgtcctactaatcctgtggccacagaagaatacgggatagtcagcagcaatttacaagcggccaatactgcagcccagacacaagttgtcaacaaccagggagccttacctggcatggtctggcagaaccgggacgtgtacctgcagggtcccatctgggccaaaattcctcacacagacggcaactttcacccgtctccgctgatgggcggctttggactgaagcatccgcctcctcagatcctgatcaaaaacactcctgttcctgctaatcccccggaggtgtttacgcctgccaagtttgcttctttcatcacacagtacagcaccggccaggtcagcgtggagatcgagtgggagctgcagaaggagaacagcaagcgctggaacccagagattcagtatacctccaattttgacaaacagactggtgtggactttgccgttgacagccagggtgtttattctgagcctcgccccattggtactcgttacctcacccgtaatctgtaa

SEQ ID NO: 473 - protein, 737 aa, Artificial Sequence
  Synthetic polypeptide
MAADGYLPDWLEDNLSEGIREWWDLKPGAPKPKANQQKQDDGRGLVLPGYKYLGPFNGLDKGEPVNAADAAALEHDKAYDQQLKAGDNPYLRYNHADAEFQERLQEDTSFGGNLGRAVFQAKKRVLEPLGLVEEAAKTAPGKKRPVEPSPQRSPDSSTGIGKKGQQPARKRLNFGQTGDSESVPDPQPLGEPPAGPSGLGSGTMAAGGGAPMADNNEGADGVGNASGNWHCDSTWLGDRVITTSTRTWALPTYNNHLYKQISSQSAGSTNDNVYFGYSTPWGYFDFNRFHCHFSPRDWQRLINNNWGFRPKKLNFKLFNIQVKEVTTNDGVTTIANNLTSTVQVFSDSEYQLPYVLGSAHQGCLPPFPADVFMIPQYGYLTLNNGSQSVGRSSFYCLEYFPSQVLRTGNNFTFSYTFEDVPFHSSYAHSQSLDRLMNPLIDQYLYYLARTQSNPGGTSGNRELQFYQGGPSTMAEQAKNWLPGPCFRQQRVSKTLDQNNNSNFAWTGATKYHLNGRNSLVNPGVAMATHKDDEDRFFPSSGVLIFGKTGATNKTTLENVLMTNEEEIRPTNPVATEEYGIVSSNLQAANTAAQTQVVNNQGALPGMVWQNRDVYLQGPIWAKIPHTDGNFHPSPLMGGFGLKHPPPQILIKNTPVPANPPEVFTPAKFASFITQYSTGQVSVEIEWELQKENSKRWNPEIQYTSNFDKQTGVDFAVDSQGVYSEPRPIGTRYLTRNL

SEQ ID NO: 474 - DNA, 2214 bp, Artificial Sequence
  Synthetic polynucleotide
atggctgccgatggttatcttccagattggctcgaggacaacctctctgagggcattcgcgagtggtgggacctgaaacctggagccccgaaacccaaagccaaccagcaaaagcaggacgacggccggggtctggtgcttcctggctacaagtacctcggacccttcaacggactcgacaagggggagcccgtcaacgcggcggacgcagcggccctcgagcacgacaaggcctacgaccagcagctcaaagcgggtgacaatccgtacctgcggtataatcacgccgacgccgagtttcaggagcgtctgcaagaagatacgtcttttgggggcaacctcgggcgagcagtcttccaggccaagaagcgggttctcgaacctctcggtctggttgaggaaggcgctaagacggctcctggaaagaagagaccggtagagccgtcaccacagcgttcccccgactcctccacgggcatcggcaagaaaggccagcagcccgccagaaagagactcaatttcggtcagactggcgactcagagtcagtccccgaccctcaacctatcggagaacctccagcagcgccctctagtgtgggatctggtacaatggctgcaggcggtggcgcaccaatggcagacaataacgaaggtgccgacggagtgggtagttcctcgggaaattggcattgcgattccacacggctgggcgacagagtcatcaccaccagcacccggacctgggctttgcccacctacaacaaccacctctacaagcaaatctccagtcagtcagcaggtagcaccaacgacaacgtctacttcggctacagcaccccctgggggtattttgacttcaacagattccactgtcacttctcaccacgtgactggcagcggctcatcaacaacaactggggattccggcccaagaagctcaacttcaagctgttcaacatccaggtcaaggaggtcacaacgaatgacggcgtcacgaccatcgccaataaccttaccagcacggttcaggtcttttcggactcggaataccagctgccctacgtcctcggctccgcacaccagggctgcctgcctccgttcccggcggacgtcttcatgattccccagtacggctacctgactctgaacaatggcagccaatcggtgggtcgttcctctttctactgcctggaatatttcccttctcaaatgctgagaacgggcaacaacttcaccttcagctacaccttcgaggacgttcccttccacagcagctacgcacacagccagagcctggaccggctgatgaatcctcttatcgaccagtacctgtattacctggccagaacacagagcaacgcaggaggcacagctggcaatcgggaactgcagttttatcagggcgggcctaccaccatggccgaacaagccaaaaactggctgcctggaccttgcttccggcaacgaagagtctccaagacgctggatcaaaacaacaacagcaactttgcttggactggtgccaccaaataccatctaaatggaagaaattcattggttaatcccggtgtcgccatggcaacccacaaggacgacgaggaacgcttcttcccttcgagcggagtcctgatttttggaaaaactggagcagctaataagactacactggaaaatgtgttaatgacaaatgaagaggaaattcgtcctaccaacccggtagccaccgaggaatacgggactgttagcagcaacctgcaggcggctaacactgcagcccagacacaagttgtcaacaaccagggagccttacctggtatggtctggcagaaccgggacgtgtacctgcagggtcccatctgggccaagattcctcacacggacggcaactttcacccgtctccgctgatgggcggctttggactgaagcatccgcctcctcagatcctgatcaaaaacactcctgttcctgctaatcccccggaggtgtttacgcctgccaagtttgcttctttcatcacacagtacagcaccggccaggtcagcgtggagatcgagtgggagctgcagaaggagaacagcaagcgctggaacccagagattcagtatacctccaattttgacaaacagactggtgtggactttgccgttgacagccagggtgtttattctgagcctcgccccattggtactcgttacctcacccgtaatctgtaa

SEQ ID NO: 475 - protein, 737 aa, Artificial Sequence
  Synthetic polypeptide
MAADGYLPDWLEDNLSEGIREWWDLKPGAPKPKANQQKQDDGRGLVLPGYKYLGPFNGLDKGEPVNAADAAALEHDKAYDQQLKAGDNPYLRYNHADAEFQERLQEDTSFGGNLGRAVFQAKKRVLEPLGLVEEGAKTAPGKKRPVEPSPQRSPDSSTGIGKKGQQPARKRLNFGQTGDSESVPDPQPIGEPPAAPSSVGSGTMAAGGGAPMADNNEGADGVGSSSGNWHCDSTRLGDRVITTSTRTWALPTYNNHLYKQISSQSAGSTNDNVYFGYSTPWGYFDFNRFHCHFSPRDWQRLINNNWGFRPKKLNFKLFNIQVKEVTTNDGVTTIANNLTSTVQVFSDSEYQLPYVLGSAHQGCLPPFPADVFMIPQYGYLTLNNGSQSVGRSSFYCLEYFPSQMLRTGNNFTFSYTFEDVPFHSSYAHSQSLDRLMNPLIDQYLYYLARTQSNAGGTAGNRELQFYQGGPTTMAEQAKNWLPGPCFRQRRVSKTLDQNNNSNFAWTGATKYHLNGRNSLVNPGVAMATHKDDEERFFPSSGVLIFGKTGAANKTTLENVLMTNEEEIRPTNPVATEEYGTVSSNLQAANTAAQTQVVNNQGALPGMVWQNRDVYLQGPIWAKIPHTDGNFHPSPLMGGFGLKHPPPQILIKNTPVPANPPEVFTPAKFASFITQYSTGQVSVEIEWELQKENSKRWNPEIQYTSNFDKQTGVDFAVDSQGVYSEPRPIGTRYLTRNL

SEQ ID NO: 476 - DNA, 2208 bp, Artificial Sequence
  Synthetic polynucleotide
atggctgccgatggttatcttccagattggctcgaggacactctctctgaaggaataagacagtggtggaagctcaaacctggcccaccaccaccaaagcccgcagagcggcataaggacgacagcaggggtcttgtgcttcctgggtacaagtacctcggacccttcaacggactcgacaagggggagccggtcaacgaggcagacgccgcggccctcgagcacgacaaggcctacgaccggcagctcgacagcggagacaacccgtacctcaagtacaaccacgccgacgcggagtttcaggagcgtcttaaagaagatacgtcttttgggggcaacctcggacgagcagtcttccaggcgaaaaagagggttcttgaacctctgggcctggttgaggaacctgttaagacggctccgggaaaaaagaggccggtagagcactctcctgcggagccagactcctcctcgggaaccggaaaagcgggccagcagcctgcaagaaaaagattgaattttggtcagactggagacgcagactccgtacctgacccccagcctctcggacagccaccagcagccccctctggtttgggatctactacaatggctacaggcagtggcgcaccaatggcagacaataacgagggtgccgatggagtgggtaattcttcaggaaattggcattgcgattcccaatggctgggcgacagagtcatcaccaccagcacccgaacctgggcccagcccacctacaacaaccacctctacaagcaaatctcaagccaatcaggagcctcaaacgacaaccactactttggctacagcaccccttgggggtattttgacttcaacagattccactgccacttttcaccacgtgactggcaaagactcatcaacaacaactggggattccgacccaagagactcaacttcaagctctttaacattcaagtcaaagaggtcacgcagaatgacggtacgacgacgattgccaataaccttaccagcacggttcaggtgtttactgactcggagtaccagctcccgtacgtcctcgggtcggcgcatcaaggatgcctcccgccgtttccagcggacgtcttcatggtcccacagtatggatacctcaccctgaacaacgggagtcaggcggtaggacgctcttccttttactgcctggagtactttccttctcagatgcttcgtactggaaacaactttcagttcagctacacctttgaagacgttcctttccacagcagctacgctcacagccagagtctggatcggctgatgaatcctctgatcgaccagtacctgtattatctgaacaaaacacaatcaaatagtggagctcttcagcagtctcggctactgtttagtcaagctggacccaccagcatgtctcttcaagctaaaaactggctacctggaccttgctacagacagcagcgtctgtcaaagcaggcaaacgacaacaacaacagcaactttccctggactgcggctacaaagtaccacctaaatggccgggactcgttggttaatccaggaccagctatggccagtcacaaagacgatgaagaaaagtttttccccatgcatggaaccctgatatttggtaaacaaggaacaaatgctaacgacgcggatttggacaatgtcatgattacagatgaagaagaaatccgcaccaccaatcccgtggctacggagcagtacggatatgtgtcaaataatttgcaaaactcaaatactggtccaactactggaactgtcaatcaccgaggagcgttacctggcatggtgtggcaggatcgagacgtgtacctgcagggacccatttgggccaagattcctcacaccgatggacactttcatccttctccactgatgggaggttttgggctcaaacacccgcctcctcagatcatgatcaaaaacactcccgttccagccaatcctcccacaaacttcagttctgccaagtttgcttctttcatcacacagtattccacggggcaggtcagcgtggagatcgagtgggagctgcagaaagagaacagcaaacgctggaatcccgaaattcagtacacttccaactacaacaaatctgttaatgtggactttactgtggacactaatggcgtgtattcagagcctcgccccattggcaccagatacctgactcgtaatctgtaa

SEQ ID NO: 477 - protein, 735 aa, Artificial Sequence
  Synthetic polypeptide
MAADGYLPDWLEDTLSEGIRQWWKLKPGPPPPKPAERHKDDSRGLVLPGYKYLGPFNGLDKGEPVNEADAAALEHDKAYDRQLDSGDNPYLKYNHADAEFQERLKEDTSFGGNLGRAVFQAKKRVLEPLGLVEEPVKTAPGKKRPVEHSPAEPDSSSGTGKAGQQPARKRLNFGQTGDADSVPDPQPLGQPPAAPSGLGSTTMATGSGAPMADNNEGADGVGNSSGNWHCDSQWLGDRVITTSTRTWAQPTYNNHLYKQISSQSGASNDNHYFGYSTPWGYFDFNRFHCHFSPRDWQRLINNNWGFRPKRLNFKLFNIQVKEVTQNDGTTTIANNLTSTVQVFTDSEYQLPYVLGSAHQGCLPPFPADVFMVPQYGYLTLNNGSQAVGRSSFYCLEYFPSQMLRTGNNFQFSYTFEDVPFHSSYAHSQSLDRLMNPLIDQYLYYLNKTQSNSGALQQSRLLFSQAGPTSMSLQAKNWLPGPCYRQQRLSKQANDNNNSNFPWTAATKYHLNGRDSLVNPGPAMASHKDDEEKFFPMHGTLIFGKQGTNANDADLDNVMITDEEEIRTTNPVATEQYGYVSNNLQNSNTGPTTGTVNHRGALPGMVWQDRDVYLQGPIWAKIPHTDGHFHPSPLMGGFGLKHPPPQIMIKNTPVPANPPTNFSSAKFASFITQYSTGQVSVEIEWELQKENSKRWNPEIQYTSNYNKSVNVDFTVDTNGVYSEPRPIGTRYLTRNL

SEQ ID NO: 478 - DNA, 2217 bp, Artificial Sequence
  Synthetic polynucleotide
atggctgccgatggttatcttccagattggctcgaggacaacctctctgagggcattcgcgagtggtgggcgctgaaacctggagccccgaagcccaaagccaaccagcaaaagcaggacgacggccggggtctggtgcttcctggctacaagtacctcggacccttcaacggactcgacaagggggagcccgtcaacgcggcggacgcagcggccctcgagcacgacaaggcctacgaccagcagctgcaggcgggtgacaatccgtacctgcggtataatcacgccgacgccgagtttcaggagcgtctgcaagaagatacgtcttttgggggcaacctcgggcgagcagtcttccaggccaagaagcgggttctcgaacctctcggtctggttgaggaaggcgctaagacggctcctggaaagaagagaccggtagagccgtcaccacagcgttcccccgactcctccacgggcatcggcaagaaaggccagcagcccgccagaaagagactcaatttcggtcagactggcgactcagagtcagtccccgaccctcaacctatcggagaacctccagcagcgccctctagtgtgggatctggtacaatggctgcaggcggtggcgcgccaatggcagacaataacgaaggtgccgacggagtgggtagttcctcgggaaattggcattgcgattccacatggctgggcgacagagtcatcaccaccagcacccgaacctgggccctgcccacctacaacaaccacctctacaagcaaacctccaacgggacctcgggaggcagcaccaacgacaacacctactttggctacagcaccccctgggggtattttgactttaacagattccactgccacttctcaccacgtgactggcagcgactcatcaacaacaactggggattccggcccaagagactcagcttcaagctcttcaacatccaggtcaaagaggtcacgcagaatgaaggcaccaagaccatcgccaataacctcaccagcaccatccaggtgtttacggactcggaataccagctgccgtacgtcctcggctctgcccaccagggctgcctgcctccgttcccggcggacgtcttcatgattcctcagtacggctacctgactctcaacaacggtagtcaggccgtgggacgttcctccttctactgcctggagtacttcccctctcagatgctgagaacgggcaacaacttttccttcagctacactttcgaggacgtgcctttccacagcagctacgcgcacagccagagtttggacaggctgatgaatcctctcatcgaccagtacctgtactacctgtcaagaacccagtctacgggaggcacagcgggaacccagcagttgctgttttctcaggccgggcctagcaacatgtcggctcaggccagaaactggctgcctggaccctgctacagacagcagcgcgtctccacgacactgtcgcaaaacaacaacagcaactttgcctggactggtgccaccaagtatcatctgaacggcagagactctctggtgaatccgggcgtcgccatggcaaccaacaaggacgacgaggaccgcttcttcccatccagcggcatcctcatgtttggcaagcagggagctggaaaagacaacgtggactatagcaacgtgatgctaaccagcgaggaagaaatcaagaccaccaaccccgtggccacagaacagtatggcgtggtggctgataacctacagcagcaaaacaccgctcctattgtgggggccgtcaacagccagggagccttacctggcatggtctggcagaaccgggacgtgtacctgcagggtcctatttgggccaagattcctcacacagatggcaactttcacccgtctcctttaatgggcggctttggacttaaacatccgcctcctcagatcctcatcaaaaacactcctgttcctgcggatcctccaacagcgttcaaccaggccaagctgaattctttcatcacgcagtacagcaccggacaagtcagcgcggagatcgagtgggagctgcagaaggagaacagcaagcgctggaacccagagattcagtatacttccaactactacaaatctacaaatgtggactttgctgttaatactgagggtgtttactctgagcctcgccccattggcactcgttacctcacccgtaatctgtaa

SEQ ID NO: 479 - protein, 738 aa, Artificial Sequence
  Synthetic polypeptide
MAADGYLPDWLEDNLSEGIREWWALKPGAPKPKANQQKQDDGRGLVLPGYKYLGPFNGLDKGEPVNAADAAALEHDKAYDQQLQAGDNPYLRYNHADAEFQERLQEDTSFGGNLGRAVFQAKKRVLEPLGLVEEGAKTAPGKKRPVEPSPQRSPDSSTGIGKKGQQPARKRLNFGQTGDSESVPDPQPIGEPPAAPSSVGSGTMAAGGGAPMADNNEGADGVGSSSGNWHCDSTWLGDRVITTSTRTWALPTYNNHLYKQTSNGTSGGSTNDNTYFGYSTPWGYFDFNRFHCHFSPRDWQRLINNNWGFRPKRLSFKLFNIQVKEVTQNEGTKTIANNLTSTIQVFTDSEYQLPYVLGSAHQGCLPPFPADVFMIPQYGYLTLNNGSQAVGRSSFYCLEYFPSQMLRTGNNFSFSYTFEDVPFHSSYAHSQSLDRLMNPLIDQYLYYLSRTQSTGGTAGTQQLLFSQAGPSNMSAQARNWLPGPCYRQQRVSTTLSQNNNSNFAWTGATKYHLNGRDSLVNPGVAMATNKDDEDRFFPSSGILMFGKQGAGKDNVDYSNVMLTSEEEIKTTNPVATEQYGVVADNLQQQNTAPIVGAVNSQGALPGMVWQNRDVYLQGPIWAKIPHTDGNFHPSPLMGGFGLKHPPPQILIKNTPVPADPPTAFNQAKLNSFITQYSTGQVSAEIEWELQKENSKRWNPEIQYTSNYYKSTNVDFAVNTEGVYSEPRPIGTRYLTRNL

SEQ ID NO: 480 - DNA, 2217 bp, Artificial Sequence
  Synthetic polynucleotide
atggctgctgacggttatcttccagattggctcgaggacaacctctctgagggcattcgcgagtggtgggacctgaaacctggagcccccaagcccaaggccaaccagcagaagcaggacgacggccggggtctggtgcttcctggctacaagtacctcggacccttcaacggactcgacaagggggagcccgtcaacgcggcggacgcagcggccctcgagcacgacaaggcctacgaccagcagctcaaagcgggtgacaatccgtacctgcggtataatcacgccgacgccgagtttcaggagcgtctgcaagaagatacgtcttttgggggcaacctcgggcgagcagtcttccaggccaagaagcgggttctcgaacctctcggtctggttgaggaagctgctaagacggctcctggaaagaagagaccggtagaaccgtcacctcagcgttcccccgactcctccacgggcatcggcaagaaaggccagcagcccgctagaaagagactgaactttgggcagactggcgactcagagtcagtccccgaccctcaaccaatcggagaacctccagcagcgccctctagtgtgggatctggtacaatggccgcaggcggtggcgcaccaatggcagacaataacgaaggtgccgacggagtgggtagttcctcgggaaattggcattgcgattccacatggctgggcgacagagtcatcaccaccagcacccgaacctgggccctgcccacctacaacaaccacctctacaagcaaatctccaacgggacctcgggaggcagcaccaacgacaacacctactttggctacagcaccccctgggggtattttgactttaacagattccactgccacttctcaccacgtgactggcagcgactcatcaacaacaactggggattccggcccaagagactcagcttcaagctcttcaacatccaggtcaaagaggtcacgcagaatgaaggcaccaagaccatcgccaataacctcaccagcaccatccaggtgtttacggactcggaataccagctgccgtacgtcctcggctctgcccaccagggctgcctgcctccgttcccggcggacgtcttcatgattcctcagtacggctacctgactctcaacaacggtagtcaggccgtgggacgttcctccttctactgcctggagtacttcccctctcagatgctgagaacgggcaacaacttttccttcagctacactttcgaggacgtgcctttccacagcagctacgcgcacagccagagtttggacaggctgatgaatcctctcatcgaccagtacctgtactacctgtcaagaacccagtctacgggaggcacagcgggaacccagcagctgctgttttctcaggccgggcctagcaacatgtcggctcaggccagaaactggctgcctggaccctgctacagacagcagcgcgtctccacgacactgtcgcaaaacaacaacagcaactttgcctggactggtgccaccaagtatcatctgaacggcagagactctctggtgaatccgggcgtcgccatggcaaccaacaaggacgacgaggaccgcttcttcccatccagcggcatcctcatgtttggcaagcagggagctggaaaagacaacgtggactatagcaacgtgatgctaaccagcgaggaagaaatcaagaccaccaaccccgtggccacagaacagtatggcgtggtggctgataacctacagcagcaaaacaccgctcctattgtgggggccgtcaacagccagggagccttacctggcatggtctggcagaaccgggacgtgtacctgcagggtcctatttgggccaagattcctcacacagatggcaactttcacccgtctcctttaatgggcggctttggacttaaacatccgcctcctcagatcctcatcaaaagcactcctgttcctgcggatcctccaacagcgttcaaccaggccaagctgaattctttcatcacgcagtacagcaccggacaagtcagcgtggagatcgagtgggagctgcagaaggagaacagcaagtgctggaacccagagattcagtatacttccaactactacaaatctacaaatgtggactttgctgttaatactgagggtgtttactctgagcctcgccccattggcactcgttacctcacccgtaatctgtaa

SEQ ID NO: 481 - protein, 738 aa, Artificial Sequence
  Synthetic polypeptide
MAADGYLPDWLEDNLSEGIREWWDLKPGAPKPKANQQKQDDGRGLVLPGYKYLGPFNGLDKGEPVNAADAAALEHDKAYDQQLKAGDNPYLRYNHADAEFQERLQEDTSFGGNLGRAVFQAKKRVLEPLGLVEEAAKTAPGKKRPVEPSPQRSPDSSTGIGKKGQQPARKRLNFGQTGDSESVPDPQPIGEPPAAPSSVGSGTMAAGGGAPMADNNEGADGVGSSSGNWHCDSTWLGDRVITTSTRTWALPTYNNHLYKQISNGTSGGSTNDNTYFGYSTPWGYFDFNRFHCHFSPRDWQRLINNNWGFRPKRLSFKLFNIQVKEVTQNEGTKTIANNLTSTIQVFTDSEYQLPYVLGSAHQGCLPPFPADVFMIPQYGYLTLNNGSQAVGRSSFYCLEYFPSQMLRTGNNFSFSYTFEDVPFHSSYAHSQSLDRLMNPLIDQYLYYLSRTQSTGGTAGTQQLLFSQAGPSNMSAQARNWLPGPCYRQQRVSTTLSQNNNSNFAWTGATKYHLNGRDSLVNPGVAMATNKDDEDRFFPSSGILMFGKQGAGKDNVDYSNVMLTSEEEIKTTNPVATEQYGVVADNLQQQNTAPIVGAVNSQGALPGMVWQNRDVYLQGPIWAKIPHTDGNFHPSPLMGGFGLKHPPPQILIKSTPVPADPPTAFNQAKLNSFITQYSTGQVSVEIEWELQKENSKCWNPEIQYTSNYYKSTNVDFAVNTEGVYSEPRPIGTRYLTRNL

SEQ ID NO: 482 - protein, 738 aa, Artificial Sequence
  Synthetic polypeptide
MAADGYLPDWLEDNLSEGIREWWDLKPGAPKPKANQQKQDDGRGLVLPGYKYLGPFNGLDKGEPVNAADAAALEHDKAYDQQLKAGDNPYLRYNHADAEFQERLQEDTSFGGNLGRAVFQAKKRVLEPLGLVEEAAKTAPGKKRPVEPSPQRSPDSSTGIGKKGQQPARKRLNFGQTGDSESVPDPQPIGEPPAAPSSVGSGTMAAGGGAPMADNNEGADGVGSSSGNWHCDSTWLGDRVITTSTRTWALPTYNNHLYKQISNGTSGGSTNDNTYFGYSTPWGYFDFNRFHCHFSPRDWQRLINNNWGFRPKRLSFKLFNIQVKEVTQNEGTKTIANNLTSTIQVFTDSEYQLPYVLGSAHQGCLPPFPADVFMIPQYGYLTLNNGSQAVGRSSFYCLEYFPSQMLRTGNNFSFSYTFEDVPFHSSYAHSQSLDRLMNPLIDQYLYYLSRTQSTGGTAGTQQLLFSQAGPSNMSAQARNWLPGPCYRQQRVSTTLSQNNNSNFAWTGATKYHLNGRDSLVNPGVAMATNKDDEDRFFPSSGILMFGKQGAGKDNVDYSNVMLTSEEEIKTTNPVATEQYGVVADNLQQQNTAPIVGAVNSQGALPGMVWQNRDVYLQGPIWAKIPHTDGNFHPSPLMGGFGLKHPPPQILIKSTPVPADPPTAFNQAKLNSFITQYSTGQVSVEIEWELQKENSKRWNPEIQYTSNYYKSTNVDFAVNTEGVYSEPRPIGTRYLTRNL

SEQ ID NO: 483 - DNA, 2217 bp, Artificial Sequence
  Synthetic polynucleotide
atggctgctgacggttatcttccagattggctcgaggacaacctctctgagggcattcgcgagtggtgggacctgaaacctggagcccccaagcccaaggccaaccagcagaagcaggacgacggccggggtctggtgcttcctggctacaagtacctcggacccttcaacggactcgacaagggggagcccgtcaacgcggcggacgcagcggccctcgagcacgacaaggcctacgaccagcagctcaaagcgggtgacaatccgtacctgcggtataaccacgccgacgccgagtttcaggagcgtctgcaagaagatacgtcttttgggggcaacctcgggcgagcagtcttccaggccaagaagcgggttctcgaacctctcggtctggttgaggaagctgctaagacggctcctggaaagaagagaccggtagaaccgtcacctcagcgttcccccgactcctccacgggcatcggcaagaaaggccagcagcccgctagaaagagactgaactttgggcagactggcgactcagagtcagtccccgaccctcaaccaatcggagaaccaccagcaggcccctctggtctgggatctggtacaatggctgcaggcggtggcgcaccaatggctgacaataacgagggcgccgacggagtgggtaatgcctcaggaaattggcattgcgattccacatggctgggcgacagagtcatcaccaccagcacccgaacctgggctttgcccacctacaacaaccacctctacaagcaaatctccagtcagtcagcaggtagcaccaacgacaacgtctacttcggctacagcaccccctgggggtattttgacttcaacagattccactgtcacttctcaccacgtgactggcagcggctcatcaacaacaactggggattccggcccaagaagctcaacttcaagctgttcaacatccaggtcaaggaggtcacaacgaatgacggcgtcacgaccatcgccaataaccctaccagcacggttcaggtcttttcggactcggaataccagctgccctacgtcctcggctccgcacaccagggctgcctgcctccgttcccggcggacgtcttcatgattccccagtacggctacctgactctgaacaatggcagccaatcggtgggtcgttcctctttctactgcctggaatatttcccttctcaaatgctgagaacgggcaacaacttcaccttcagctacaccttcgaggacgttcccttccacagcagctacgcacacagccagagcctggaccggctgatgaatcctcttatcgaccagtacctgtattacctggccagaacacagagcaacgcaggaggcacagctggcaatcgggaactgcagttttatcagggcgggcctaccaccatggccgaacaagccaaaaactggctgcctggaccctgctacagacagcagcgcgtctccacgacactgtcgcaaaacaacaacagcaactttgcctggactggtgccaccaagtatcatctgaacggcagagactctctggtgaatccgggcgtcgccatggcaaccaacaaggacgacgaggaccgcttcttcccatccagcggcatcctcatgtttggcaagcagggagctggaaaagacaacgtggactatagcaacgtgatgctaaccagcgaggaagaaatcaagaccaccaaccccgtggccacagaacagtatggcgtggtggctgataacctacagcagcaaaacaccgctcctattgtgggggccgtcaacagccagggagccttacctggcatggtctggcagaaccgggacgtgtacctgcagggtcctatttgggccaagattcctcacacagatggcaactttcacccgtctcctttaatgggcggctttggacttaaacatccgcctcctcagatcctcatcaaaaacactcctgttcctgcggatcctccaacagcgttcaaccaggccaagctgaattctttcatcacgcagtacagcaccggacaagtcagcgtggagatcgagtgggagctgcagaaggagaacagcaagcgctggaacccagagattcagtatacttccaactactacaaatctacaaatgtggactttgctgttaatactgagggtgtttactctgagcctcgccccattggcactcgttacctcacccgtaatctgtaa

SEQ ID NO: 484 - protein, 738 aa, Artificial Sequence
  Synthetic polypeptide
MAADGYLPDWLEDNLSEGIREWWDLKPGAPKPKANQQKQDDGRGLVLPGYKYLGPFNGLDKGEPVNAADAAALEHDKAYDQQLKAGDNPYLRYNHADAEFQERLQEDTSFGGNLGRAVFQAKKRVLEPLGLVEEAAKTAPGKKRPVEPSPQRSPDSSTGIGKKGQQPARKRLNFGQTGDSESVPDPQPIGEPPAGPSGLGSGTMAAGGGAPMADNNEGADGVGNASGNWHCDSTWLGDRVITTSTRTWALPTYNNHLYKQISSQSAGSTNDNVYFGYSTPWGYFDFNRFHCHFSPRDWQRLINNNWGFRPKKLNFKLFNIQVKEVTTNDGVTTIANNPTSTVQVFSDSEYQLPYVLGSAHQGCLPPFPADVFMIPQYGYLTLNNGSQSVGRSSFYCLEYFPSQMLRTGNNFTFSYTFEDVPFHSSYAHSQSLDRLMNPLIDQYLYYLARTQSNAGGTAGNRELQFYQGGPTTMAEQAKNWLPGPCYRQQRVSTTLSQNNNSNFAWTGATKYHLNGRDSLVNPGVAMATNKDDEDRFFPSSGILMFGKQGAGKDNVDYSNVMLTSEEEIKTTNPVATEQYGVVADNLQQQNTAPIVGAVNSQGALPGMVWQNRDVYLQGPIWAKIPHTDGNFHPSPLMGGFGLKHPPPQILIKNTPVPADPPTAFNQAKLNSFITQYSTGQVSVEIEWELQKENSKRWNPEIQYTSNYYKSTNVDFAVNTEGVYSEPRPIGTRYLTRNL

SEQ ID NO: 485 - DNA, 2208 bp, Artificial Sequence
  Synthetic polynucleotide
atggctgccgatggttatcttccagattggctcgaggacaacctctctgagggcattcacgagtggtgggacccgaaacctggagccccgaaacccaaagccaaccagcaaaagcaggacgacggccggggtctggtgcttcctggctacaagtacctcggacccttcaacggactcgacaagggggagcccgtcaacgcggcggacgcagcggccctcgagcacgacaaggcctacgaccagcagctcaaagcgggtgacaatccgtacctgcggtataatcacgccgacgccgagtttcaggagcgtctgcaagaagatacgtcttttgggggcaacctcgggcgagcagtcttccaggccaagaagcgggttctcgaacctctcggtctggttgaggaaggcgctaagacggctcctggaaagaagagaccggtagagccgtcaccacagcgttcccccgactcctccacgggcatcggcaagaaaggccagcagcccgccagaaagagactcaatttcggtcagactggcgactcagagtcagtccccgaccctcaacctatcggagaacctccagcagcgccctctagtgtgggatctggtacaatggctgcaggcggtggcgcaccaatggcagacaataacgaaggtgccgacggagtgggtagttcctcgggaaattggcattgcgattccacatggctgggcgacagagtcatcaccaccagcacccgaacctgggccctgcccacccacaacaaccacctctacaagcaaatctccaacgggacctcgggaggcagcaccaacgacaacgtctacttcggctacagcaccccctgggggtattttgacttcaacagattccactgtcacttctcaccacgtgaccggcagcgactcatcaacaacaactggggattccggcccaagagactcagcttcaagctcttcaacatccaggtcaaagaggtcacgcagaatgaaggcaccaagaccatcgccaataacctcaccagcaccatccaggtgtttacggactcggaataccagctgccgtacgtcctcggctctgcccaccagggctgcctgcctccgttcccggcggacgtcttcatgattcctcagtacggctacctgactctcaacaacggtagtcaggccgtgggacgttcctccttctactgcctggagtacttcccctctcagatgctgagaacgggcaacaacttttccttcagctacactttcgaggacgtgcctttccacagcagctacgcgcacagccagagtttggacaggctgatgaatcctctcatcgaccagtacctgtactacctgtcaagaacccagtctacggaaggcacagcgggaacccagcagttgctgttttctcaggccgggcctagcaacatgtcggctcaggccagaaactggctgcctggaccctgctacagacagcagcgcgtctccacgacactgtcgcaaaacaacaacagcaactttgcctggactggtgccaccaagtatcatctgaacggcagagactctctggtgaatccgggcgtcgccatggcaacccacaaggacgacgaggaacgcttcttcccttcgagcggagtcctgatttttggaaaaactggagcagctaataagactacactggaaaatgtgttaatgacaaatgaagaggaaattcgtcctaccaacccggtagccaccgaggaatacgggactgttagcagcaacctgcaggcggctaacactgcagcccagacacaagttgtcaacaaccagggagccttacctggtatggtctggcagaaccgggacgtgtacctgcagggtcccatctgggccaagattcctcacacggacggcaactttcacccgtctccgctgatgggcggctttggactgaagcatcctcagatcctgatcaaaaacactcctgttcctgctaatcccccggaggtgtttacgcctgccaagtttgcttctttcatcacacagtacagcaccggccaggtcagcgtggagatcgagtgggagctgcagaaggagaacagcaagcgctggaacccagagattcagtatacctccaattttgacaaacagactggtgtggactttgccgttgacagccagggtgtttattctgagcctcgccccattggtactcgttacctcacccgtaatctgtaa

SEQ ID NO: 486 - protein, 735 aa, Artificial Sequence
  Synthetic polypeptide
MAADGYLPDWLEDNLSEGIHEWWDPKPGAPKPKANQQKQDDGRGLVLPGYKYLGPFNGLDKGEPVNAADAAALEHDKAYDQQLKAGDNPYLRYNHADAEFQERLQEDTSFGGNLGRAVFQAKKRVLEPLGLVEEGAKTAPGKKRPVEPSPQRSPDSSTGIGKKGQQPARKRLNFGQTGDSESVPDPQPIGEPPAAPSSVGSGTMAAGGGAPMADNNEGADGVGSSSGNWHCDSTWLGDRVITTSTRTWALPTHNNHLYKQISNGTSGGSTNDNVYFGYSTPWGYFDFNRFHCHFSPRDRQRLINNNWGFRPKRLSFKLFNIQVKEVTQNEGTKTIANNLTSTIQVFTDSEYQLPYVLGSAHQGCLPPFPADVFMIPQYGYLTLNNGSQAVGRSSFYCLEYFPSQMLRTGNNFSFSYTFEDVPFHSSYAHSQSLDRLMNPLIDQYLYYLSRTQSTEGTAGTQQLLFSQAGPSNMSAQARNWLPGPCYRQQRVSTTLSQNNNSNFAWTGATKYHLNGRDSLVNPGVAMATHKDDEERFFPSSGVLIFGKTGAANKTTLENVLMTNEEEIRPTNPVATEEYGTVSSNLQAANTAAQTQVVNNQGALPGMVWQNRDVYLQGPIWAKIPHTDGNFHPSPLMGGFGLKHPQILIKNTPVPANPPEVFTPAKFASFITQYSTGQVSVEIEWELQKENSKRWNPEIQYTSNFDKQTGVDFAVDSQGVYSEPRPIGTRYLTRNL

SEQ ID NO: 487 - protein, 738 aa, Artificial Sequence
  Synthetic polypeptide
MAADGYLPDWLEDNLSEGIREWWDLKPGAPKPKANQQKQDDGRGLVLPGYKYLGPFNGLDKGEPVNAADAAALEHDKAYDQQLKAGDNPYLRYNHADAEFQERLQEDTSFGGNLGRAVFQAKKRVLEPLGLVEEGAKTAPGKKRPVEPSPQRSPDSSTGIGKKGQQPARKRLNFGQTGDSESVPDPQPIGEPPAAPSSVGSGTMAAGGGAPMADNNEGADGVGSSSGNWHCDSTWLGDRVITTSTRTWALPTYNNHLYKQISNGTSGGSTNDNTYFGYSTPWGYFDFNRFHCHFSPRDWQRPINNNWGFRPKRLSFKLFNIQVKEVTQNEGTKTIANNLTSTIQVFTDSEYQLPYVLGSAHQGCLPPFPADVFMIPQYGYLTLNNGSQAVGRSSFYCLEYFPSQMLRTGNNFSFSYPFEDVPFHSSYAHSQSLDRLMNPLIDQYLYYLSRTQSTGGTAGTQQLLFSQAGPSNMSAQARNWLPGPCYRQQRVSTTLSQNNNSNFAWTGATKYHLNGRDSLVNPGVAMATNKDDEDRFFPSSGILMFGKQGAGKDNVDYSNVMLTSEEEIKTTNPVATEQYGVVADNLQQQDTAPIVGAVNSQGALPGMVWQNRDVYLQGPIWAKIPHTDGNFHPSPLMGGFGLKHPPPQVLIKNTPVPADPPTAFNQAKLNSFITQYSTGQVSVEIEWELQKENSKRWNPEIQYTSNYYKSTNVDFAVNTEGVYSEPRPIGTRYLTRNL

SEQ ID NO: 488 - DNA, 2217 bp, Artificial Sequence
  Synthetic polynucleotide
atggctgccgatggttatcttccagattggctcgaggacaacctctctgagggcattcgcgagtggtgggacctgaaacctggagccccgaaacccaaggccaaccagcaaaagcaggacgacggccggggtctggtgcttcctggctacaagtacctcggacccttcaacggactcgacaagggggagcccgtcaacgcggcggacgcagcggccctcgagcacgacaaggcctacgaccagcagctcaaagcgggtgacaatccgtacctgcggtataatcacgccgacgccgagtttcaggagcgtctgcaagaagatacgtcttttgggggcaacctcgggcgagcagtcttccaggccaagaagcgggttctcgaacctctcggtctggttgaggaaggcgctaagacggctcctggaaagaagagaccggtagagccgtcaccacagcgttcccccgactcctccacgggcatcggcaagaaaggccagcagcccgccagaaagagactcaatttcggtcagactggcgactcagagtcagtccccgaccctcaacctatcggagaacctccagcagcgccctctagtgtgggatctggtacaatggctgcaggcggtggcgcaccaatggcagacaataacgaaggtgccgacggagtgggtagttcctcgggaaattggcattgcgattccacatggctgggcgacagagtcatcaccaccagcacccgaacctgggccctgcccacctacaacaaccacctctacaagcaaatctccaacgggacctcgggaggcagcaccaacgacaacacctactttggctacagcaccccctgggggtattttgactttaacagattccactgccacttctcaccacgtgactggcagcgacccatcaacaacaactggggattccggcccaagagactcagcttcaagctcttcaacatccaggtcaaagaggtcacgcagaatgaaggcaccaagaccatcgccaataacctcaccagcaccatccaggtgtttacggactcggaataccagctgccgtacgtcctcggctctgcccaccagggctgcctgcctccgttcccggcggacgtcttcatgattcctcagtacggctacctgactctcaacaacggtagtcaggccgtgggacgttcctccttctactgcctggagtacttcccctctcagatgctgagaacgggcaacaacttttccttcagctaccctttcgaggacgtgcctttccacagcagctacgcgcacagccagagtttggacaggctgatgaatcctctcatcgaccagtacctgtactacctgtcaagaacccagtctacgggaggcacagcgggaacccagcagttgctgttttctcaggccgggcctagcaacatgtcggctcaggccagaaactggctgcctggaccctgctacagacagcagcgcgtctccacgacactgtcgcaaaacaacaacagcaactttgcctggactggtgccaccaagtatcatctgaacggcagagactctctggtgaatccgggcgtcgccatggcaaccaacaaggacgacgaggaccgcttcttcccatccagcggcatcctcatgtttggcaagcagggagctggaaaagacaacgtggactatagcaacgtgatgctaaccagcgaggaagaaatcaagaccaccaaccccgtggccacagaacagtatggcgtggtggctgataacctacagcagcaagacaccgctcctattgtgggggccgtcaacagccagggagccttacctggcatggtctggcagaaccgggacgtgtacctgcagggtcctatttgggccaagattcctcacacagatggcaactttcacccgtctcctttaatgggcggctttggacttaaacatccgcctcctcaggtcctcatcaaaaacactcctgttcctgcggatcctccaacagcgttcaaccaggccaagctgaattctttcatcacgcagtacagcaccggacaagtcagcgtggagatcgagtgggagctgcagaaggagaacagcaagcgctggaacccagagattcagtatacttccaactactacaaatctacaaatgtggactttgctgttaatactgagggtgtttactctgagcctcgccccattggcactcgttacctcacccgtaatctgtaa

SEQ ID NO: 489 - DNA, 2214 bp, Artificial Sequence
  Synthetic polynucleotide
atggctgctgacggttatcttccagattggctcgaggacaacctctctgagggcattcgcgagtggtgggacctgaaacctggagcccccaagcccaaggccaaccagcagaagcaggacgacggccggggtctggtgcttcctggctacaagtacctcggacccttcaacggactcgacaagggggagcccgtcaacgcggcggacgcagcggccctcgagcacgacaaggcctacgaccagcagctcaaagcgggtgacaatccgtacctgcggtataaccacgccgacgccgagttccaggagcgtctgcaagaagatacgtcttttgggggcaacctcgggcgagcagtcttccaggccaagaagcgggttctcgaacctctcggtctggctgaggaagctgctaagacggctcctggaaagaagagaccggtagaaccgtcacctcagcgttcccccgactcctccacgggcatcggcaagaaaggccagcagcccgctagaaagagactgaactttgggcagactggcgactcagagtcagtccccgaccctcaaccaatcggagagccaccagcaggcccctctggtctgggatctggtacaatggctgcaggcggtggcgcaccaatggctgacaataacaagggcgccgacggagtgggtaatgcctcaggaaattggcattgcgattccacatggctgggcgacagagtcatcaccaccagcacccgaacctgggctttgcccacctacaacaaccacctctacaagcaaatctccagtcagtcagcaggtagcaccaacgacaacgtctacttcggctacagcaccccctgggggtattttgacttcaacagattccactgtcacttctcaccacgtgactggcagcggctcatcaacaacaactggggattccggcccaagaagctcaacttcaagctgttcaacatccaggtcaaggaggtcacaacgggtgacggcgtcacgaccatcgccaataaccttaccagcacggttcaggtcttttcggactcggaataccagctgccctacgtcctcggctccgcacaccagggctgcctgcctccgttcccggcggacgtcttcatgattccccagtacggctacctgactctgaacaatgacagccaatcggtgggtcgttcctctttctactgcctggaatatttcccttctcaaatgctgagaacgggcaacaacttcaccttcagctacaccttcgaggacgttcccttccacagcagctacgcacacagccagagcctggaccggctgatgaatcctcttatcgaccagtacctgtattacctggccagaacacagagcaacgcaggaggcacagctggcaatcgggaactgcagttttatcagggcgggcctaccaccatggccgaacaagccaaaaactggctgcctggaccttgcttccggcaacaaagagtctccaagacgctggatcaaaacaacaacagcaactttgcttggactggtgccaccaaataccatctaaatggaagaaattcattggttaatcccggtgtcgccatggcaacccacaaggacgacgaggaacgcttcttcccttcgagcggagtcctgatttttggaaaaactggagcagctaataagactacactggaaaatgtgttaatgacaaatgaagaggaaattcgtcctaccaacccggtagccaccgaggaatacgggactgttagcagcaacctgcaggcggctaacactgcagcccagacacaagttgtcaacaaccagggagccttacctggtatggtctggcagaaccgggacgtgtacctgcagggtcccatctgggccaagattcctcacacggacggcaactttcacccgtctccgctgatgggcggctttggactgaagcatccgcctcctcagatcctgatcaaaaacactcctgttcctgctaatcccccggaggtgtttacgcctgccaagtttgcttctttcatcacacagtacagcaccggccaggtcagcgtggagatcgagtgggagctgcagaaggagaacagcaagcgctggaacccagagattcagtatacctccaattttgacaaacagactggtgtggactttgccgttgacagccagggtgtttattctgagcctcgccccattggtactcgttacctcacccgtaatctgtaa

SEQ ID NO: 490 - protein, 737 aa, Artificial Sequence
  Synthetic polypeptide
MAADGYLPDWLEDNLSEGIREWWDLKPGAPKPKANQQKQDDGRGLVLPGYKYLGPFNGLDKGEPVNAADAAALEHDKAYDQQLKAGDNPYLRYNHADAEFQERLQEDTSFGGNLGRAVFQAKKRVLEPLGLAEEAAKTAPGKKRPVEPSPQRSPDSSTGIGKKGQQPARKRLNFGQTGDSESVPDPQPIGEPPAGPSGLGSGTMAAGGGAPMADNNKGADGVGNASGNWHCDSTWLGDRVITTSTRTWALPTYNNHLYKQISSQSAGSTNDNVYFGYSTPWGYFDFNRFHCHFSPRDWQRLINNNWGFRPKKLNFKLFNIQVKEVTTGDGVTTIANNLTSTVQVFSDSEYQLPYVLGSAHQGCLPPFPADVFMIPQYGYLTLNNDSQSVGRSSFYCLEYFPSQMLRTGNNFTFSYTFEDVPFHSSYAHSQSLDRLMNPLIDQYLYYLARTQSNAGGTAGNRELQFYQGGPTTMAEQAKNWLPGPCFRQQRVSKTLDQNNNSNFAWTGATKYHLNGRNSLVNPGVAMATHKDDEERFFPSSGVLIFGKTGAANKTTLENVLMTNEEEIRPTNPVATEEYGTVSSNLQAANTAAQTQVVNNQGALPGMVWQNRDVYLQGPIWAKIPHTDGNFHPSPLMGGFGLKHPPPQILIKNTPVPANPPEVFTPAKFASFITQYSTGQVSVEIEWELQKENSKRWNPEIQYTSNFDKQTGVDFAVDSQGVYSEPRPIGTRYLTRNL

SEQ ID NO: 491 - DNA, 2217 bp, Artificial Sequence
  Synthetic polynucleotide
atggctgccgatggttatcttccagattggctcgaggacaacctctctgagggcattcgcgagtggtgggacctgaaacctggagccccgaaacccaaagccaaccagcaaaagcaggacgacggccggggtctggtgcttcctggctacaagtacctcggacccttcaacggactcgacaagggggagcccgtcaacgcggcggacgcagcggccctcgagcacgacaaggcctacgaccagcagctcaaagcgggtgacaatccgtacctgcggtataatcacgccgacgccgagtttcaggagcgtctgcaagaagatacgtcttttgggggcaacctcgggcgagcagtcttccaggccaagaagcgggttctcgaacctctcggtctggttgaggaaggcgctaagacggctcctggaaagaagagaccggtagagccgtcaccacagcgttcccccgactcctccacgggcatcggcaagaaaggccagcagcccgccagaaagagactcaatttcggtcagactggcgactcagagtcagtccccgaccctcaacctatcggagaacctccagcagcgccctctagtgtgggatctggtacaatggctgcaggcggtggcgcaccaatggcagacaataacgaaggtgccgacggagtgggtagttcctcgggaaattggcattgcgattccacatggctgggcgacagagtcatcaccaccagcacccgaacctgggccctgcccacctacaacaaccacctctacaagcaaatctccaacgggacctcgggaggcagcaccaacgacaacacctactttggctacagcaccccctgggggtattttgactttaacagattccactgccacttctcaccacgtgactggcagcgactcatcaacaacaactggggattccggcccaagagactcagcttcaagctcttcaacatccaggtcaaagaggtcacgcagaatgaaggcaccaagaccatcgccaataacctcaccagcaccatccaggtgtttacggactcggaataccagctgccgtacgtcctcggctctgcccaccagggctgcctgcctccgttcccggcggacgtcttcatgattcctcagtacggctacctgactctcaacaacggtagtcaggccgtgggacgttcctccttctactgcctggagtacttcccctctcagatgctgagaacgggcaacaacttttccttcagctacactttcgaggacgtgcctttccacagcagctacgcgcacagccagagtttggacaggctgatgaatcctctcatcgaccagtacctgtactacctgtcaagaacccagtctacgggaggcacagcgggaacccagcagttgctgttttctcaggccgggcctagcaacatgtcggctcaggccagaaactggctgcctggaccctgctacagacagcagcgcgtctccacgacactgtcgcaaaacaacaacagcaactttgcctggactggtgccaccaagtatcatctgaacggcagagactctctggtgaatccgggcgtcgccatggcaaccaacaaggacgacgaggaccgcttcttcccatccagcggcatcctcatgtttggcaagcagggagctggaaaagacaacgtggactatagcaacgtgatgctaaccagcgaggaagaaatcaagaccaccaaccccgtggccacagaacagtatggcgtggtggctgataacctacagcagcaaaacaccgctcctattgtgggggccgtcaacagccagggagccttacctggcatggtctggcagaaccgggacgtgtacctgcagggtcctatttgggccaagattcctcacacagatggcaactttcacccgtctcctttaatgggcggctttggacttaaacatccgcctcctcagatcctcatcaaaaacactcctgttcctgcggatcctccaacagcgttcaaccaggccaagctgaattctttcatcacgcagtacagcaccggacaagtcagcgtggagatcgtgtgggagctgcagaaggagaacagcaagcgcaggaacccagagattcagtatacttccaactactacaaatctacaaatgtggactttgctgttaatactgagggtgtttactctgagcctcgccccattggcactcgttacctcacccgtaatctgtaa

SEQ ID NO: 492 - protein, 738 aa, Artificial Sequence
  Synthetic polypeptide
MAADGYLPDWLEDNLSEGIREWWDLKPGAPKPKANQQKQDDGRGLVLPGYKYLGPFNGLDKGEPVNAADAAALEHDKAYDQQLKAGDNPYLRYNHADAEFQERLQEDTSFGGNLGRAVFQAKKRVLEPLGLVEEGAKTAPGKKRPVEPSPQRSPDSSTGIGKKGQQPARKRLNFGQTGDSESVPDPQPIGEPPAAPSSVGSGTMAAGGGAPMADNNEGADGVGSSSGNWHCDSTWLGDRVITTSTRTWALPTYNNHLYKQISNGTSGGSTNDNTYFGYSTPWGYFDFNRFHCHFSPRDWQRLINNNWGFRPKRLSFKLFNIQVKEVTQNEGTKTIANNLTSTIQVFTDSEYQLPYVLGSAHQGCLPPFPADVFMIPQYGYLTLNNGSQAVGRSSFYCLEYFPSQMLRTGNNFSFSYTFEDVPFHSSYAHSQSLDRLMNPLIDQYLYYLSRTQSTGGTAGTQQLLFSQAGPSNMSAQARNWLPGPCYRQQRVSTTLSQNNNSNFAWTGATKYHLNGRDSLVNPGVAMATNKDDEDRFFPSSGILMFGKQGAGKDNVDYSNVMLTSEEEIKTTNPVATEQYGVVADNLQQQNTAPIVGAVNSQGALPGMVWQNRDVYLQGPIWAKIPHTDGNFHPSPLMGGFGLKHPPPQILIKNTPVPADPPTAFNQAKLNSFITQYSTGQVSVEIVWELQKENSKRRNPEIQYTSNYYKSTNVDFAVNTEGVYSEPRPIGTRYLTRNL

SEQ ID NO: 493 - protein, 738 aa, Artificial Sequence
  Synthetic polypeptide
MAADGYLPDWLEDNLSEGIREWWDLKPGAPKPKANQQKQDDGRGLVLPGYKYLGPFNGLDKGEPVNAADAAALEHDKAYDQQLKAGDNPYLRYNHADAEFQERLQEDTSFGGNLGRAVFQAKKRVLEPLGLVEEGAKTAPGKKRPVEPSPQRSPDSSTGIGKKGQQPARKRLNFGQTGDSESVPDPQPIGEPPAAPSSVGSGTMAAGGGAPMADNNEGADGVGSSSGNWHCDSTWLGDRVITTSTRTWALPTYNNHLYKQISNGTSGGSTNDNTYFGYSTPWGYFDFNRFHCHFSPRDWQRLINNNWGFRPKRLSFKLFNIQVKEVTQNEGTKTIANNLTSTIQVFTDSEYQLPYVLGSAHQGCLPPFPADVFMIPQYGYLTLNNGSQAVGRSSFYCLEYFPSQMLRTGNNFSFSYTFEDVPFHSSYAHSQSLDRLMNPLIDQYLYYLSRTQSTGGTAGTQQLLFSQAGPSNMSAQARNWLPGPCYRQQRVSTTLSQNNNSNFAWTGATKYHLNGRDSLVNPGVAMATNKDDEDRFFPSSGILMFGKQGAGKDNVDYSNVMLTSEEEIKTTNPVATEQYGVVADNLQQQNTAPIVGAVNSQGALPGMVWQNRDVYLQGPIWAKIPHTDGNFHPSPLMGGFGLKHPPPQILIKNTPVPADPPTAFNQAKLNSFITQYSTGQVSVEIEWELQKENSKRWNPEIQYTSNYYKSTNVDFAVNTEGVYSEPRPIGTRYLTRNL

SEQ ID NO: 494 - protein, 738 aa, Artificial Sequence
  Synthetic polypeptide
MAADGYLPDWLEDNLSEGIREWWDLKPGAPKPKANQQKQDDGRGLVLPGYKYLGPFNGLDKGEPVNAADAAALEHDKAYDQQLKAGDNPYLRYNHADAEFQERLQEDTSFGGNLGRAVFQAKKRVLEPLGLVEEGAKTAPGKKRPVEPSPQRSPDSSTGIGKKGQQPARKRLNFGQTGDSESVPDPQPIGEPPAAPSSVGSGTMAAGGGAPMADNNEGADGVGSSSGNWHCDSTWLGDRVITTSTRTWALPTYNNHLYKQISNGTSGGSTNDNTYFGYSTPWGYFDFNRFHCHFSPRDWQRLINNNWGFRPKRLSFKLFNIQVKEVTQNEGTKTIANNLTSTIQVFTDSEYQLPYVLGSAHQGCLPPFPADVFMIPQYGYLTLNNGSQAVGRSSFYCLEYFPSQMLRTGNNFSFSYTFEDVPFHSSYAHSQSLDRLMNPLIDQYLYYLSRTQSTGGTAGTQQLLFSQAGPSNMSAQARNWLPGPCYRQQRVSTTLSQNNNSNFAWTGATKYHLNGRDSLVNPGVAMATNKDDEDRFFPSSGILMFGKQGAGKDNVDYSNVMLTSEEEIKTTNPVATEQYGVVADNLQQQNTAPIVGAVNSQGALPGMVWQNRDVYLQGPIWAKIPHTDGNFHPSPLMGGFGLKHPPPQILIKNTPVPADPPTAFNQAKLNSFITQYSTGQVSVEIVWELQKENSKRWNPEIQYTSNYYKSTNVDFAVNTEGVYSEPRPIGTRYLTRNL

SEQ ID NO: 495 - protein, 738 aa, Artificial Sequence; identical to SEQ ID NO: 493
  Synthetic polypeptide

SEQ ID NO: 496 - DNA, 2214 bp, Artificial Sequence
  Synthetic polynucleotide
atggctgctgacggttatcttccagattggctcgaggacaacctctctgagggcattcgcgagtggtgggacctgaaacctggagcccccaagcccaaggccaaccagcagaagcaggacgacggccggggtctggtgcttcctggctacaagtacctcggacccttcaacggactcgacaagggggagcccgtcaacgcggcggacgcagcggccctcgagcacgacaaggcctacgaccagcagctcaaagcgggtgacaatccgtacctgcggtataaccacgccgacgccgagtttcaggagcgtctgcaagaagatacgtcttttgggggcaacctcgggcgagcagtcttccaggccaagaagcgggttctcgaacctctcggtctggttgaggaagctgctaagacggctcctggaaagaagagaccggtagaaccgtcacctcagcgttcccccgactcctccacgggcatcggcaagaaaggccagcagcccgctagaaagagactgaactttgggcagactggcgactcagagtcagtccccgaccctcaaccaatcggagaaccaccagcaggcccctctggtctgggatctggtacaatggctgcaggcggtggcgctccaatggcagacaataacgaaggcgccgacggagtgggtaatgcctcaggaaattggcattgcgattccacatggctgggcgacagagtcatcaccaccagcacccgaacctgggctttgcccacctacaacaaccacctctacaagcaaatctccagtcagtcagcaggtagcaccaacgacaacgtctacttcggctacagcaccccctgggggtattttgacttcaacagattccactgtcacttctcaccacgtgactggcagcggctcatcaacaacaactggggattccggcccaagaagctcaacttcaagctgttcaacatccaggtcaaggaggtcacaacgaatgacggcgtcacgaccatcgccaataaccttaccagcacggttcaggtcttttcggactcggaataccagctgccctacgtcctcggctccgcacaccagggctgcctgcctccgttcccggcggacgtcttcatgattccccagtacggctacctgactctgaacaatggcagccaatcggtgggtcgttcctctttctactgcctggaatatttcccttctcaaatgctgagaacgggcaacaacttcaccttcagctacaccttcgaggacgttcccttccacagcagctacgcacacagccagagcctggaccggctgatgaatcctcttatcgaccagtacctgtattacctggccagaacacagagcaacgcaggaggcacagctggcaatcgggaactgcagttttatcagggcgggcctaccaccatggccgaacaagccaaaaactggctgcctagaccttgcttccggcaacaaagagtctccaagacgctggatcaaaacaacaacagcaactttgcttggactggtgccaccaaataccatctaaatggaagaaattcattggttaatcccggtgtcgccatggcaacccacaaggacgacgaggaacgcttcttcccttcgagcggagtcctgatttttggaaaaactggagcagctaataagactacactggaaaatgtgttaatgacaaatgaagaggaaattcgtcctaccaacccggtagccaccgaggaatacgggactgttagcagcaacctgcaggcggctaacactgcagcccagacacaagttgtcaacaaccagggagccttacctggtatggtctggcagaaccgggacgtgtacctgcagggtcccatctgggccaagattcctcacacggacggcaactttcacccgtctccgctgatgggcggctttggactgaagcatccgcctcctcagatcctgatcaaaaacactcctgttcctgctaatcccccggaggtgtttacgcctgccaagtttgcttctttcatcacacagtacagcaccggccaggtcagcgtggagatcgagtgggagctgcagaaggagaacagcaagcgctggaacccagagattcagtatacctccaattttgacaaacagactggtgtggactttgccgttgacagccagggtgtttattctgagcctcgccccattggtactcgttacctcacccgtaatctgtaa

SEQ ID NO: 497 - protein, 737 aa, Artificial Sequence
  Synthetic polypeptide
MAADGYLPDWLEDNLSEGIREWWDLKPGAPKPKANQQKQDDGRGLVLPGYKYLGPFNGLDKGEPVNAADAAALEHDKAYDQQLKAGDNPYLRYNHADAEFQERLQEDTSFGGNLGRAVFQAKKRVLEPLGLVEEAAKTAPGKKRPVEPSPQRSPDSSTGIGKKGQQPARKRLNFGQTGDSESVPDPQPIGEPPAGPSGLGSGTMAAGGGAPMADNNEGADGVGNASGNWHCDSTWLGDRVITTSTRTWALPTYNNHLYKQISSQSAGSTNDNVYFGYSTPWGYFDFNRFHCHFSPRDWQRLINNNWGFRPKKLNFKLFNIQVKEVTTNDGVTTIANNLTSTVQVFSDSEYQLPYVLGSAHQGCLPPFPADVFMIPQYGYLTLNNGSQSVGRSSFYCLEYFPSQMLRTGNNFTFSYTFEDVPFHSSYAHSQSLDRLMNPLIDQYLYYLARTQSNAGGTAGNRELQFYQGGPTTMAEQAKNWLPRPCFRQQRVSKTLDQNNNSNFAWTGATKYHLNGRNSLVNPGVAMATHKDDEERFFPSSGVLIFGKTGAANKTTLENVLMTNEEEIRPTNPVATEEYGTVSSNLQAANTAAQTQVVNNQGALPGMVWQNRDVYLQGPIWAKIPHTDGNFHPSPLMGGFGLKHPPPQILIKNTPVPANPPEVFTPAKFASFITQYSTGQVSVEIEWELQKENSKRWNPEIQYTSNFDKQTGVDFAVDSQGVYSEPRPIGTRYLTRNL

SEQ ID NO: 498 - DNA, 2214 bp, Artificial Sequence
  Synthetic polynucleotide
atggctgctgacggttatcttccagattggctcgaggacaacctctctgagggcattcgcgagtggtgggacctgaaacctggagcccccaagcccaaggccaaccagcagaagcaggacgacggccggggtctggtgcttcctggctacaagtacctcggacccttcaacggactcgacaagggggagcccgtcaacgcggcggacgcagcggccctcgagcacgacaaggcctacgaccagcagctcaaagcgggtgacaatccgtacctgcggtataaccatgccgacgccgagtttcaggagcgtctgcaagaagatacgtcttttgggggcaacctcgggcgagcagtcctccaggccaagaagcgggttctcgaacctctcggtctggttgaggaagctgctaagacggctcctggaaagaagagaccggtagaaccgtcacctcagcgttcccccgactcctccacgggcatcggcaagaaaggccagcagcccgctagaaagagactgaactttgggcagactggcgactcagagtcagtccccgaccctcaaccaatcggagaaccaccagcaggcccctctggtctgggatctggtacaatggctgcaggcggtggcgctccaatggcagacaataacgaaggcgccgacggagtgggtaatgcctcaggaaattggcattgcgattccacatggctgggcgacagagtcatcaccaccagcacccgaacctgggctttgcccacctacaacaaccacctctacaagcaaatctccagtcagtcagcaggtagcaccaacgacaacgtctacttcggctacagcaccccctgggggtattttgacttcaacagattccactgtcacttctcaccacgtgactggcagcggctcatcaacaacaactggggattccggcccaagaagctcaacttcaagctgttcaacatccaggtcaaggaggtcacaacgaatgacggcgtcacgaccatcgccaataaccttaccagcacggttcaggtcttttcggactcggaataccagctgccctacgtcctcggctccgcacaccagggctgcctgcctccgttcccggcggacgtcttcatgattccccagtacggctacctgactctgaacaatggcagccaatcggtgggtcgttcctctttctactgcctggaatatttcccttctcaaatgctgagaacgggcaacaacttcaccttcagctacaccttcgaggacgttcccttccacagcagctacgcacacagccagagcctggaccggctgatgaatcctcttatcgaccagtacctgtattacctggccagaacacagagcaacgcaggaggcacagctggcaatcgggaactgcagttttatcagggcgggcctaccaccatggccgaacaagccaaaaactggctgcctggaccttgcttccggcaacaaagagtctccaagacgctggatcaaaacaacaacagcaactttgcttggactggtgccaccaaataccatctaaatggaagaaattcattggttaatcccggtgtcgccatggcaacccacaaggacgacgaggaacgcttcttcccttcgagcggagtcctgatttttggaaaaactggagcagctaataagactacactggaaaatgtgttaatgacaaatgaagaggaaattcgtcctaccaacccggtagccaccgaggaatacgggactgttagcagcaacctgcaggcggctaacactgcagcccagacacaagttgtcaacaaccagggagccttacctggtatggtctggcagaaccgggacgtgtacctgcagggtcccatctgggccaagattcctcacacggacggcaactttcacccgtctccgctgatgggcggctttggactgaagcatccgcctcctcagatcctgatcaaaaacactcctgttcctgctaatcccccggaggtgtttacgcctgccaagtttgcttctttcatcacacagtacagcaccggccaggtcagcgtggagatcgagtgggagctgcagaaggagaacagcaagcgctggaacccagagattcagtatacctccaattttgacaaacagactggtgtggactttgccgttgacagccagggtgtttattctgagcctcgccccattggtactcgttacctcacccgtaatctgtaa

SEQ ID NO: 499 - protein, 737 aa, Artificial Sequence; identical to SEQ ID NO: 458
  Synthetic polypeptide

SEQ ID NO: 500 - protein, 737 aa, Artificial Sequence
  Synthetic polypeptide
MAADGYLPDWLEDNLSEGIREWWDLKPGAPKPKANQQKQDDGRGLVLPGYKYLGPFNGLDKGEPVNAADAAALEHDKAYDQQLKAGDNPYLRYNHADAEFQERLQEDTSFGGNLGRAVLQAKKRVLEPLGLVEEAAKTAPGKKRPVEPSPQRSPDSSTGIGKKGQQPARKRLNFGQTGDSESVPDPQPIGEPPAGPSGLGSGTMAAGGGAPMADNNEGADGVGNASGNWHCDSTWLGDRVITTSTRTWALPTYNNHLYKQISSQSAGSTNDNVYFGYSTPWGYFDFNRFHCHFSPRDWQRLINNNWGFRPKKLNFKLFNIQVKEVTTNDGVTTIANNLTSTVQVFSDSEYQLPYVLGSAHQGCLPPFPADVFMIPQYGYLTLNNGSQSVGRSSFYCLEYFPSQMLRTGNNFTFSYTFEDVPFHSSYAHSQSLDRLMNPLIDQYLYYLARTQSNAGGTAGNRELQFYQGGPTTMAEQAKNWLPGPCFRQQRVSKTLDQNNNSNFAWTGATKYHLNGRNSLVNPGVAMATHKDDEERFFPSSGVLIFGKTGAANKTTLENVLMTNEEEIRPTNPVATEEYGTVSSNLQAANTAAQTQVVNNQGALPGMVWQNRDVYLQGPIWAKIPHTDGNFHPSPLMGGFGLKHPPPQILIKNTPVPANPPEVFTPAKFASFITQYSTGQVSVEIEWELQKENSKRWNPEIQYTSNFDKQTGVDFAVDSQGVYSEPRPIGTRYLTRNL

SEQ ID NO: 501 - DNA, 2217 bp, Artificial Sequence
  Synthetic polynucleotide
atggctgccgatggttatcttccagattggctcgaggacaacctctctgagggcattcgcgagtggtgggacctgaaacctggagccccgaaacccaaagccaaccagcaaaagcaggacgacggccggggtctggtgcttcctggctacaagtacctcggacccttcaacggactcgacaagggggagcccgtcaacgcggcggacgcagcggccctcgagcacgacaaggcctacgaccagcagctcaaagcgggtgacaatccgtacctgcggtataatcacgccgacgccgagtttcaggagcgtctgcaagaagatacgtcttttgggggcaacctcgggcgagcagtcttccaggccaagaagcgggttctcgaacctctcggtctggttgaggaaggcgctaagacggctcctggaaagaagagaccggtagagccgtcaccacagcgttcccccgactcctccacgggcatcggcaagaaaggccagcagcccgccagaaagagactcaatttcggtcagactggcgactcagagtcagtccccgaccctcaacctatcggagaacctccagcagcgccctctagtgtgggatctggtacaatggctgcaggcggtggcgcaccaatggcagacaataacgaaggtgccgacggagtgggtagttcctcgggaaattggcattgcgattccacatggctgggcgacagagtcatcaccaccagcacccgaacctgggccctgcccacctacaacaaccacctctacaagcaaatctccaacgggacctcgggaggcagcaccaacgacaacacctactttggctacagcaccccctgggggtattttgactttaacagattccactgccacttctcaccacgtgactggcagcgactcatcaacaacaactggggattccggcccaagagactcagcttcaagctcttcaacatccaggtcaaagaggtcacgcagaatgaaggcaccaagaccatcgccaataacctcaccagcaccatccaggtgtttacggactcggaataccagctgccgtacgtcctcggctctgcccaccagggctgcctgcctccgttcccggcggacgtcttcatgattcctcagtacggctacctgactctcaacaacggtagtcaggccgtgggacgttcctccttctactgcctggagtacttcccctctcagatgctgagaacgggcaacaacttttccttcagctacactttcgaggacgtgcctttccacagcagctacgcgcacagccagagtttggacaggctgatgaatcctctcatcgaccagtacctgtactacctgtcaagaacccagtctacgggaggcacagcgggaacccagcagttgctgttttctcaggccgggcctagcaacatgtcggctcaggccagaaactggctgcctggaccctgctacagacagcagcgcgtctccacgacactgtcgcaaaacaacaacagcaactttgcctggactggtgccaccaagtatcatctgaacggcagagactctctggtgaatccgggcgtcgccatggcaaccaacaaggacgacgaggaccgcttcttcccacccagcggcatcctcatgtttggcaagcagggagctggaaaagacaacgtggactatagcaacgtgatgctaaccagcgaggaagaaatcaagaccaccaaccccgtggccacagaacagtatggcgtggtggctgataacctacagcagcaaaacaccgctcctattgtgggggccgtcaacagccagggagccttacctggcatggtctggcagaaccgggacgtgtacctgcagggtcctatttgggccaagattcctcacacagatggcaactttcacccgtctcctttaatgggcggctttggacttaaacatccgcctcctcagatcctcatcaaaaacactcctgttcctgcggatcctccaacagcgttcaaccaggccaagctgaattctttcatcacgcagtacagcaccggacaagtcagcgtggtgatcgagtgggagctgcagaaggagaacagcaagcgctggaacccagagattcagtatacttccaactactacaaatctacaaatgtggactttgctgttaatactgagggtgtttactctgagcttcgccccattggcactcgttacctcacccgtaatctgtaa

SEQ ID NO: 502 - protein, 738 aa, Artificial Sequence
  Synthetic polypeptide
MAADGYLPDWLEDNLSEGIREWWDLKPGAPKPKANQQKQDDGRGLVLPGYKYLGPFNGLDKGEPVNAADAAALEHDKAYDQQLKAGDNPYLRYNHADAEFQERLQEDTSFGGNLGRAVFQAKKRVLEPLGLVEEGAKTAPGKKRPVEPSPQRSPDSSTGIGKKGQQPARKRLNFGQTGDSESVPDPQPIGEPPAAPSSVGSGTMAAGGGAPMADNNEGADGVGSSSGNWHCDSTWLGDRVITTSTRTWALPTYNNHLYKQISNGTSGGSTNDNTYFGYSTPWGYFDFNRFHCHFSPRDWQRLINNNWGFRPKRLSFKLFNIQVKEVTQNEGTKTIANNLTSTIQVFTDSEYQLPYVLGSAHQGCLPPFPADVFMIPQYGYLTLNNGSQAVGRSSFYCLEYFPSQMLRTGNNFSFSYTFEDVPFHSSYAHSQSLDRLMNPLIDQYLYYLSRTQSTGGTAGTQQLLFSQAGPSNMSAQARNWLPGPCYRQQRVSTTLSQNNNSNFAWTGATKYHLNGRDSLVNPGVAMATNKDDEDRFFPPSGILMFGKQGAGKDNVDYSNVMLTSEEEIKTTNPVATEQYGVVADNLQQQNTAPIVGAVNSQGALPGMVWQNRDVYLQGPIWAKIPHTDGNFHPSPLMGGFGLKHPPPQILIKNTPVPADPPTAFNQAKLNSFITQYSTGQVSVVIEWELQKENSKRWNPEIQYTSNYYKSTNVDFAVNTEGVYSELRPIGTRYLTRNL

SEQ ID NO: 503 - DNA, 2214 bp, Artificial Sequence
  Synthetic polynucleotide
atggctgctgacggttatcttccagattggctcgaggacaacctctctgagggcattcgcgagtggtgggacctgaaacctggagcccccaagcccaaggccaaccagcagaagcaggacgacggccggggtctggtgcttcctggctacaagtacctcggacccttcaacggactcgacaagggggagcccgtcaacgcggcggacgcagcggccctcgagcacgacaaggcctacgaccagcagctcaaagcgggtgacaatccgtacctgcggtataaccacgccgacgccgagtttcaggagcgtctgcaagaagatacgtcttttgggggcaacctcgggcgagcagtcttccaggccaagaagcgggttctcgaacctctcggtctggttgaggaagctgctaagacggctcctggaaagaagagaccggtagaaccgtcacctcagcgttcccccgactcctccacgggcatcggcaagaaaggccagcagcccgctagaaagagactgaactttgggcagactggcgactcagagtcagtccccgaccctcaaccaatcggagaaccaccagcaggcccctctggtctgggatctggtacaatggctgcaggcggtggcgccccaatggcagacaataacgaaggcgccgacggagtgggtaatgcctcaggaaattggcattgcgattccacatggctgggcgacagagtcatcaccaccagcacccgaacctgggctttgcccacctacaacaaccacctctacaagcaaatctccagtcagtcagcaggtagcaccaacgacaacgtctacttcggctacagcaccccctgggggtattttgacttcaacagattccactgtcacttctcaccacgtgactggcagcggctcatcaacaacaactggggattccggcccaagaagctcaacttcaagctgttcaacatccaggtcaaggaggtcacaacgaatgacggcgtcacgaccatcgccaataaccttaccagcacggttcaggtcttttcggactcggaataccagctgccctacgtcctcggctccgcacaccagggctgcctgcctccgttcccggcggacgtcttcatgattccccagtacggctacctgactctgaacaatggcagccaatcggtgggtcgttcctctttctactgcctggaatatttcccttctcaaatgctgagaacgggcaacaacttcaccatcagctacaccttcgaggacgttcccttccacagcagctacgcacacagccagagcctggaccggctgatgaatcctcttatcgaccagtacctgtattacctggccagaacacagagcaacgcaggaggcacagctggcaatcaggaactgcagttttatcagggcgggcctaccaccatggccgaacaagccaaaaactggctgcctggaccttgcttccggcaacaaagagtctccaagacgctggatcaaaacaacaacagcaactttgcttggactggtgccaccaaataccatctaaatggaagaaattcattggttaatcccggtgtcgccatggcaacccacaaggacgacgaggaacgcttcttcccttcgagcggagtcctgatttttggaaaaactggagcagctaataagactacactggaaaatgtgttaatgacaaatgaagaggaaattcgtcctaccaacccggtagccaccgaggaatacgggactgttagcagcaacctgcaggcggctaacactgcagcccagacacaagttgtcaacaaccagggagccttacctggtatggtctggcagaaccgggacgtgtacctgcagggtcccatctgggccaagattcctcacacagatggcaactttcacccgtctcctttaatgggcggctttggacttaaacatccgcctcctcagatcctcatcaaaaacactcctgttcctgcggatcctccaacagcgttcaaccaggccaagctgaattctttcatcacgcagtacagcaccggacaagtcagcgtggagatcgagtgggagctgcagaaggagaacagcaagcgctggaacccagagattcagtatacttccaactactacaaatctacaaatgtggactttgctgttaatactgagggtgtttactctgagcctcgccccattggcactcgttacctcacccgtaatctgtaa

SEQ ID NO: 504 - protein, 737 aa, Artificial Sequence
  Synthetic polypeptide
MAADGYLPDWLEDNLSEGIREWWDLKPGAPKPKANQQKQDDGRGLVLPGYKYLGPFNGLDKGEPVNAADAAALEHDKAYDQQLKAGDNPYLRYNHADAEFQERLQEDTSFGGNLGRAVFQAKKRVLEPLGLVEEAAKTAPGKKRPVEPSPQRSPDSSTGIGKKGQQPARKRLNFGQTGDSESVPDPQPIGEPPAGPSGLGSGTMAAGGGAPMADNNEGADGVGNASGNWHCDSTWLGDRVITTSTRTWALPTYNNHLYKQISSQSAGSTNDNVYFGYSTPWGYFDFNRFHCHFSPRDWQRLINNNWGFRPKKLNFKLFNIQVKEVTTNDGVTTIANNLTSTVQVFSDSEYQLPYVLGSAHQGCLPPFPADVFMIPQYGYLTLNNGSQSVGRSSFYCLEYFPSQMLRTGNNFTISYTFEDVPFHSSYAHSQSLDRLMNPLIDQYLYYLARTQSNAGGTAGNQELQFYQGGPTTMAEQAKNWLPGPCFRQQRVSKTLDQNNNSNFAWTGATKYHLNGRNSLVNPGVAMATHKDDEERFFPSSGVLIFGKTGAANKTTLENVLMTNEEEIRPTNPVATEEYGTVSSNLQAANTAAQTQVVNNQGALPGMVWQNRDVYLQGPIWAKIPHTDGNFHPSPLMGGFGLKHPPPQILIKNTPVPADPPTAFNQAKLNSFITQYSTGQVSVEIEWELQKENSKRWNPEIQYTSNYYKSTNVDFAVNTEGVYSEPRPIGTRYLTRNL

SEQ ID NO: 505 - DNA, 2217 bp, Artificial Sequence
  Synthetic polynucleotide
atggctgccgatggttatcttccagattggctcgaggacaacctctctgagggcattcgcgagtggtgggacctgaaacctggagccccgaaacccaaagccaaccagcaaaagcaggacgacggccggggtctggtgcttcctggctacaagtacctcggacccttcaacggactcgacaagggggagcccgtcaacgcggcggacgcagcggccctcgagcacgacaaggcctacgaccagcagctcaaagcgggtgacaatccgtacctgcggtataatcacgccgacgccgagtttcaggagcgtctgcaagaagatacgtcttttgggggcaacctcgggcgagcagtcttccaggccaagaagcgggttctcgaacctctcggtctggttgaggaaggcgctaagacggctcctggaaagaagagaccggtagagccgtcaccacagcgttcccccgactcctccacgggcatcggcaagaaaggccagcagcccgccagaaagagactcaatttcggtcagactggcgactcagagtcagtccccgaccctcaacctatcggagaacctccagcagcgccctctagtgtgggatctggtacaatggctgcaggcggtggcgcaccaatggcagacaataacgaaggtgccgacggagtgggtagttcctcgggaaattggcattgcgattccacatggctgggcgacagagtcatcaccaccagcacccgaacctgggccctgcccgcctacaacaaccacctctacaagcaaatctccaacgggacctcgggaggcagcaccaacgacaacacctactttggctacagcaccccctgggggtattttgactttaacagattccactgccacttctcaccacgtgactggcagcgactcatcaacaacaactggggattccggcccaagagactcagcttcaagctcttcaacatccaggtcaaagaggtcacgcagaatgaaggcaccaagaccatcgccaataacctcaccagcaccatccaggtgtttacggactcggaataccagctgccgtacgtcctcggctctgcccaccagggctgcctgcctccgttcccggcggatgtcttcatgattcctcagtacggctacctgactctcaacaacggtagtcaggccgtgggacgttcctccttctactgcctggagtacttcccctctcagatgctgagaacgggcaacaacttttccttcagctacactttcgaggacgtgcctttccacagcagctacgcgcacagccagagtttggacaggctgatgaatcctctcatcgaccagtacctgtactacctgtcaagaacccagtctacgggaggcacagcgggaacccagcagttgctgttttctcaggccgggcctagcaacatgtcggctcaggccagaaactggctgcctggaccctgctacagacagcagcgcgtctccacgacactgtcgcaaaacaacaacagcaactttgcctggactggtgccaccaagtatcatctgagcggcagagactctctggtgaatccgggcgtcgccatggcaaccaacaaggacgacgaggaccgcttcttcccatccagcggcatcctcatgtttggcaagcagggagctggaaaagacaacgtggactatagcaacgtgatgctaaccagcgaggaagaaatcaagaccaccaaccccgtggccacagaacagtatggcgtggtggctgataacctacagcagcaaaacaccgctcctattgtgggggccgtcaacagccagggagccttacctggcatggtctggcagaaccgggacgtgtacctgcagggtcctatttgggccaagattcctcacacagatggcaactttcacccgtctcctttaatgggcggctttggacttaaacatccgcctcctcagatcctcatcaaaaacactcctgttcctgcggatcctccaacagcgttcaaccaggccaagctgaattcttccatcacgcagtacagcaccggacaagtcagcgtggagatcgagtgggagctgcagaaggagaacagcaagcgctggaacccagagattcagtatacttccaactactacaaatctacaaatgtggactttgctgttaatactgagggtgtttactctgagcctcgccccattggcactcgttacctcacccgtaatttgtaa

SEQ ID NO: 506 - protein, 738 aa, Artificial Sequence
  Synthetic polypeptide
MAADGYLPDWLEDNLSEGIREWWDLKPGAPKPKANQQKQDDGRGLVLPGYKYLGPFNGLDKGEPVNAADAAALEHDKAYDQQLKAGDNPYLRYNHADAEFQERLQEDTSFGGNLGRAVFQAKKRVLEPLGLVEEGAKTAPGKKRPVEPSPQRSPDSSTGIGKKGQQPARKRLNFGQTGDSESVPDPQPIGEPPAAPSSVGSGTMAAGGGAPMADNNEGADGVGSSSGNWHCDSTWLGDRVITTSTRTWALPAYNNHLYKQISNGTSGGSTNDNTYFGYSTPWGYFDFNRFHCHFSPRDWQRLINNNWGFRPKRLSFKLFNIQVKEVTQNEGTKTIANNLTSTIQVFTDSEYQLPYVLGSAHQGCLPPFPADVFMIPQYGYLTLNNGSQAVGRSSFYCLEYFPSQMLRTGNNFSFSYTFEDVPFHSSYAHSQSLDRLMNPLIDQYLYYLSRTQSTGGTAGTQQLLFSQAGPSNMSAQARNWLPGPCYRQQRVSTTLSQNNNSNFAWTGATKYHLSGRDSLVNPGVAMATNKDDEDRFFPSSGILMFGKQGAGKDNVDYSNVMLTSEEEIKTTNPVATEQYGVVADNLQQQNTAPIVGAVNSQGALPGMVWQNRDVYLQGPIWAKIPHTDGNFHPSPLMGGFGLKHPPPQILIKNTPVPADPPTAFNQAKLNSSITQYSTGQVSVEIEWELQKENSKRWNPEIQYTSNYYKSTNVDFAVNTEGVYSEPRPIGTRYLTRNL

SEQ ID NO: 507 - protein, 736 aa, Artificial Sequence; identical to SEQ ID NO: 7
  Synthetic polypeptide

SEQ ID NO: 508 - DNA, 2217 bp, Artificial Sequence
  Synthetic polynucleotide
atggctgctgacggttatcttccagattggctcgaggacaacctctctgagggcattcgcgagtggtgggacctgaaacctggagcccccaagcccaaggccaaccagcagaagcaggacgacggccggggtctggtgcttcctggctacaagtacctcggacccttcaacggactcgacaagggggagcccgtcaacgcggcggacgcagcggccctcgagcacgacaaggcctacgaccagcagctcaaagcgggtgacaatccgtacctgcggtataaccacgccgacgccgagtttcaggagcgtctgcaagaagatacgtcttttgggggcaacctcgggcgagcagtcttccaggccaagaagcgggttctcgaacctctcggtctggttgaggaagctgctaagacggctcctggaaagaagagaccggtagaaccgtcacctcagcgttcccccgactcctccacgggcatcggcaagaaaggccagcagcccgctaaaaagagactgaactttggtcagactggcgactcagagtcagtccccgaccctcaaccaatcggagaaccaccagcaggcccctctggtctgggatctggtacaatggctgcaggcggtggcgctccaatggcagacaataacgaaggcgccgacggagtgggtagttcctcaggaaattggcattgcgattccacatggctgggcgacagagtcatcaccaccagcacccgaacctgggccctgcccacctacaacaaccacctctacaagcaaatatccaatgggacatcgggaggaagcaccaacgacaacacctacttcggctacagcaccccctgggggtattttgacttcaacagattccactgccacttctcaccacgtgactggcagcgactcatcaacaacaactggggattccggccaaaaagactcagcttcaagctcttcaacatccaggtcaaggaggtcacgcagaatgaaggcaccaagaccatcgccaataaccttaccagcacgattcaggtatttacggactcggaataccagctgccgtacgtcctcggctccgcgcaccagggctgcctgcctccgttcccggcggacgtcttcatgattccccagtacggctaccttacactgaacaatggaagtcaagccgtaggccgttcctccttctactgcctggaatattttccatctcaaatgctgcgaactggaaacaattttgaattcagctacaccttcgaggacgtgcctttccacagcagctacgcacacagccagagcttggaccgactgatgaatcctctcatcgaccagtacctgtactacttatccagaactcagtccacaggaggaactcaaggtacccagcaattgttattttctcaagctgggcctgcaaacatgtcggctcaggctaagaactggctacctggaccttgctaccggcagcagcgagtctctacgacactgtcgcaaaacaacaacagcaactttgcttggactggtgccaccaaatatcacctgaacggaagagactctttggtaaatcccggtgtcgccatggcaacccacaaggacgacgaggaacgcttcttcccgtcgagtggagtcctgatgtttggaaaacagggtgctggaagagacaatgtggactacagcagcgttatgctaaccagcgaagaagaaattaaaaccactaaccctgtagccacagaacaatacggtgtggtggctgacaacttgcagcaaaccaatacagggcctattgtgggaaatgtcaacagccaaggagccttacctggcatggtctggcagaaccgagacgtgtacctgcagggtcccatctgggccaagattcctcacacggacggcaacttccacccttcaccgctaatgggaggatttggactgaagcacccacctcctcagatcctgatcaagaacacgccggtacctgcggatcctccaacaacgttcagccaggcgaaattggcttccttcattacgcagtacagcaccggacaggtcagcgtggaaatcgagtgggagctgcagaaggagaacagcaaacgctggaacccagagattcagtacacttcaaactactacaaatctacaaatgtggactttgctgtcaatacagagggaacttattctgagcctcgccccattggtactcgttacctcacccgtaatctgtaa

SEQ ID NO: 509 - protein, 738 aa, Artificial Sequence
  Synthetic polypeptide
MAADGYLPDWLEDNLSEGIREWWDLKPGAPKPKANQQKQDDGRGLVLPGYKYLGPFNGLDKGEPVNAADAAALEHDKAYDQQLKAGDNPYLRYNHADAEFQERLQEDTSFGGNLGRAVFQAKKRVLEPLGLVEEGAKTAPGKKRPVEPSPQRSPDSSTGIGKKGQQPARKRLNFGQTGDSESVPDPQPLGEPPAAPSSVGSGTMAAGGGAPMADNNEGADGVGSSSGNWHCDSTWLGDRVITTSTRTWALPTYNNHLYKQISNGTSGGSTNDNTYFGYSTPWGYFDFNRFHCHFSPRDWQRLINNNWGFRPKRLSFKLFNIQVKEVTQNEGTKTIANNLTSTIQVFTDSEYQLPYVLGSAHQGCLPPFPADVFMIPQYGYLTLNNGSQAVGRSSFYCLEYFPSQMLRTGNNFSFSYTFEDVPFHSSYAHSQSLDRLMNPLIDQYLYYLSRTQSTGGTAGTQQLLFSQAGPSNMSAQARNWLPGPCYRQQRVSTTLSQNNNSNFAWTGATKYHLNGRDSLVNPGVAMATNKDDEDRFFPSSGILMFGKQGAGKDNVDYSNVMLTSEEEIKTTNPVATEQYGVVADNLQRQNTAPIVGAVNSQGALPGMVWQNRDVYLQGPIWAKIPHTDGNFHPSPLMGGFGLKHPPPQILIKNTPVPADPPTAFNQAKLNSFITQYSTGQVSVEIEWELQKENSKRWNPEIQYTSNYYKSTNVDFAVNTEGVYSEPRPIGTRYLTRNL

SEQ ID NO: 510 - protein, 736 aa, Artificial Sequence
  Synthetic polypeptide
MAADGYLPDWLEDNLSEGIREWLNLKPGAPQPKANQQKQDNARGLVLPGYKYLGPFNGLDKGDPVNEADAAALEHDKAYGQQLKAGDNPYLKYNHADAEFQERLQKDTSFGGNLGKAVFQAKKRILEPLGLVETPAKTAPGKKRPVDPSPQRSPDSSSGIGKKSPHPARKRLNFGQTGEAESVPDPQPIGEPPSDPSSVGSGTMAAGGGAPMADNNEGADGVGNSSGNWHCDSTWLGDRVITTSTRTWALPTYNNHLYKQISSQSGATNDNHYFGYSTPWGYFDFNRFHCHFSPRDWQRLINNNWGFRPKRLSFKLFNIQVKEVTQNDGTTTIANNLTSTVQVFTDSEYQLPYVLGSAHQGCLPPFPADVFMIPQYGYLTLNNGSQAVGRSSFYCLEYFPSQMLRTGNNFQFSYTFEDVPFHSSYAHSQSLDRLMNPLIDQYLYYLSKTQGTNATVQGAKLQFSQAGPSNMRDQARNWLPGPCYRQQRVSKTANDNNNSEYAWTGATKYHLNGRDSLVNPGPAMASHKDDEEKFFPMNGTLVFGKNGAGNSNVDIENVMITDEEEIRTTNPVATEQYGVVSDNLQSSNTRPITGDVDSQGVLPGMVWQDRDVYLQGPIWAKIPHTDGHFHPSPLMGGFGLKHPPPQILIKNTPVPANPATTFTPGKFASFITQYSTGQVSVQIEWELQKENSKRWNPEIQYTSNYNKSVNVDFTVDTNGVYSEPRPIGTRYLTRNL

SEQ ID NO: 511 - protein, 736 aa, Artificial Sequence; identical to SEQ ID NO: 86
  Synthetic polypeptide

SEQ ID NO: 512 - protein, 736 aa, Artificial Sequence
  Synthetic polypeptide
MAADGYLPDWLEDNLSEGIREWWDLKPGAPKPKANQQKQDDGRGLVLPGYKYLGPFNGLDKGEPVNAADAAALEHDKAYDQQLKAGDNPYLRYNHADAEFQERLQEDTSFGGNLGRAVFQAKKRVLEPLGLVEEGAKTAPGKKRPVEQSPQEPDSSSGIGKTGQQPAKKRLNFGQTGDSESVPDPQPLGEPPAAPSGLGPNTMASGGGAPMADNNEGADGVGNSSGNWHCDSTWLGDRVITTSTRTWALPTYNNHLYKQISNGTSGGSTNDNTYFGYSTPWGYFDFNRFHCHFSPRDWQRLINNNWGFRPKRLNFKLFNIQVKEVTTNEGTKTIANNLTSTVQVFTDSEYQLPYVLGSAHQGCLPPFPADVFMVPQYGYLTLNNGSQALGRSSFYCLEYFPSQMLRTGNNFQFSYTFEDVPFHSSYAHSQSLDRLMNPLIDQYLYYLVRTQTTGTGGTQTLAFSQAGPSSMANQARNWVPGPCYRQQRVSTTTNQNNNSNFAWTGAAKFKLNGRDSLMNPGVAMASHKDDEDRFFPSSGVLIFGKQGAGNDGVDYSQVLITDEEEIKATNPVATEEYGAVAINNQAANTQAQTGLVHNQGVIPGMVWQNRDVYLQGPIWAKIPHTDGNFHPSPLMGGFGLKHPPPQILIKNTPVPADPPLTFNQAKLNSFITQYSTGQVSVEIEWELQKENSKRWNPEIQYTSNYYKSTNVDFAVNTEGVYSEPRPIGTRYLTRNL

SEQ ID NO: 513 - protein, 736 aa, Artificial Sequence; identical to SEQ ID NO: 512
  Synthetic polypeptide

SEQ ID NO: 514 - protein, 736 aa, Artificial Sequence
  Synthetic polypeptide
MAADGYLPDWLEDNLSEGIREWWDLKPGAPKPKANQQKQDDGRGLVLPGYKYLGPFNGLDKGEPVNAADAAALEHDKAYDQQLKAGDNPYLRYNHADAEFQERLQEDTSFGGNLGRAVFQAKKRVLEPLGLVEEGAKTAPGKKRPVEQSPQEPDSSSGIGKTGQQPAKKRLNFGQTGDSESVPDPQPLGEPPAAPSGLGPNTMASGGGAPMADNNEGADGVGNSSGNWHCDSTWLGDRVITTSTRTWALPTYNNHLYKQISNGTSGGSTNDNTYFGYSTPWGYFDFNRFHCHFSPRDWQRLINNNWGFRPKRLNFKLFNIQVKEVTTNEGTKTIANNLTSTVQVFTDSEYQLPYVLGSAHQGCLPPFPADVFMVPQYGYLTLNNGSQALGRSSFYCLEYFPSQMLRTGNNFQFSYTFEDVPFHSSYAHSQSLDRLMNPLIDQYLYYLVRTQTTGTGGTQTLAFSQAGPSSMANQARNWVPGPCYRQQRVSTTTNQNNNSNFAWTGAAKFKLNGRDSLMNPGVAMASHKDDEDRFFPSSGVLIFGKQGAGNDGVDYSQVLITDEEEIKATNPVATEEYGAVAINNQRANTQAQTGLVHNQGVIPGMVWQNRDVYLQGPIWAKIPHTDGNFHPSPLMGGFGLKHPPPQILIKNTPVPADPPLTFNQAKLNSFITQYSTGQVSVEIEWELQKENSKRWNPEIQYTSNYYKSTNVDFAVNTEGVYSEPRPIGTRYLTRNL

SEQ ID NO: 515 - protein, 736 aa, Artificial Sequence
  Synthetic polypeptide
MAADGYLPDWLEDNLSEGIREWWDLKPGAPKPKANQQKQDDGRGLVLPGYKYLGPFNGLDKGEPVNAADAAALEHDKAYDQQLKAGDNPYLRYNHADAEFQERLQEDTSFGGNLGRAVFQAKKRVLEPLGLVEEGAKTAPGKKRPVEQSPQEPDSSSGIGKTGQQPAKKRLNFGQTGDSESVPDPQPLGEPPAAPSGLGPNTMASGGGAPMADNNEGADGVGNSSGNWHCDSTWLGDRVITTSTRTWALPTYNNHLYKQISNGTSGGSTNDNTYFGYSTPWGYFDFNRFHCHFSPRDWQRLINNNWGFRPKRLNFKLFNIQVKEVTTNEGTKTIANNLTSTVQVFTDSEYQLPYVLGSAHQGCLPPFPADVFMVPQYGYLTLNNGSQALGRSSFYCLEYFPSQMLRTGNNFQFSYTFEDVPFHSSYAHSQSLDRLMNPLIDQYLYYLVRTQTTGTGGTQTLAFSQAGPSSMANQARNWVPGPCYRQQRVSTTTNQNNNSNFAWTGAAKFKLNGRDSLMNPGVAMASHKDDEDAFFPSSGVLIFGKQGAGNDGVDYSQVLITDEEEIKATNPVATEEYGAVAINNQAANTQAQTGLVHNQGVIPGMVWQNRDVYLQGPIWAKIPHTDGNFHPSPLMGGFGLKHPPPQILIKNTPVPADPPLTFNQAKLNSFITQYSTGQVSVEIEWELQKENSKRWNPEIQYTSNYYKSTNVDFAVNTEGVYSEPRPIGTRYLTRNL

SEQ ID NO: 516 - DNA, 1803 bp, Bovine adeno-associated virus
acggcgcctgcggcaaaaaagaggcctctagagcagagtcctcaagagccagactcctcgagcggagttggcaagaaaggcaaacagcctgccagaaagagactcaactttgacgacgaacctggagccggagacgggcctcccccagaaggaccatcttccggagctatgtctactgagactgaaatgcgtgcagcagctggcggaaatggtggcgatgcgggacaaggtgccgagggagtgggtaatgcctccggtgattggcattgcgattccacttggtcagagagccacgtcaccaccacctcaacccgcacctgggtcctgccgacctacaacaaccacctgtacctgcggctcggctcgagcaacgccagcgacaccttcaacggattctccaccccctggggatactttgactttaaccgcttccactgccacttctcgccaagagactggcaaaggctcatcaacaaccactggggactgcgccccaaaagcatgcaagtccgcatcttcaacatccaagttaaggaggtcacgacgtctaacggggagacgaccgtatccaacaacctcaccagcacggtccagatctttgcggacagcacgtacgagctcccgtacgtgatggatgcaggtcaggagggcagcttgcctcctttccccaacgacgtgttcatggtgcctcagtacgggtactgcggactggtaaccggaggcagctctcaaaaccagacagacagaaatgccttctactgtctggagtactttcccagccagatgctgagaaccggaaacaactttgagatggtgtacaagtttgaaaacgtgcccttccactccatgtacgctcacagccagagcctggataggctgatgaacccgctgctggaccagtacctgtgggagctccagtctaccacctctggaggaactctcaaccagggcaattcagccaccaactttgccaagctgaccaaaacaaacttttctggctaccgcaaaaactggctcccggggcccatgatgaagcagcagagattctccaagactgccagtcaaaactacaagattccccagggaagaaacaacagtctgctccattatgagaccagaactaccctcgacggaagatggagcaattttgccccgggaacggccatggcaaccgcagccaacgacgccaccgacttctctcaggcccagctcatctttgcggggcccaacatcaccggcaacaccaccacagatgccaataacctgatgttcacttcagaagatgaacttagggccaccaacccccgggacactgacctgtttggccacctggcaaccaaccagcaaaacgccaccaccgttcctaccgtagacgacgtggacggagtcggcgtgtacccgggaatggtgtggcaggacagagacatttactaccaagggcccatttgggccaaaattccacacacggatggacactttcacccgtctcctctcattggcggatttggactgaaaagcccgcctccacaaatattcatcaaaaacactcctgtacccgccaatcccgcaacgaccttctctccggccagaatcaacagcttcatcacccagtacagcaccggacaggtggctgtcaaaatagaatgggaaatccagaaggagcggtccaagagatggaacccagaggtccagttcacgtccaactacggagcacaggactcgcttctctgggctcccgacaacgccggagcctacaaagagcccagggccattggatcccgatacctcaccaaccacctctag

SEQ ID NO: 517 - DNA, 1617 bp, Bovine adeno-associated virus
atgcgtgcagcagctggcggaaatggtggcgatgcgggacaaggtgccgagggagtgggtaatgcctccggtgattggcattgcgattccacttggtcagagagccacgtcaccaccacctcaacccgcacctgggtcctgccgacctacaacaaccacctgtacctgcggctcggctcgagcaacgccagcgacaccttcaacggattctccaccccctggggatactttgactttaaccgcttccactgccacttctcgccaagagactggcaaaggctcatcaacaaccactggggactgcgccccaaaagcatgcaagtccgcatcttcaacatccaagttaaggaggtcacgacgtctaacggggagacgaccgtatccaacaacctcaccagcacggtccagatctttgcggacagcacgtacgagctcccgtacgtgatggatgcaggtcaggagggcagcttgcctcctttccccaacgacgtgttcatggtgcctcagtacgggtactgcggactggtaaccggaggcagctctcaaaaccagacagacagaaatgccttctactgtctggagtactttcccagccagatgctgagaaccggaaacaactttgagatggtgtacaagtttgaaaacgtgcccttccactccatgtacgctcacagccagagcctggataggctgatgaacccgctgctggaccagtacctgtgggagctccagtctaccacctctggaggaactctcaaccagggcaattcagccaccaactttgccaagctgaccaaaacaaacttttctggctaccgcaaaaactggctcccggggcccatgatgaagcagcagagattctccaagactgccagtcaaaactacaagattccccagggaagaaacaacagtctgctccattatgagaccagaactaccctcgacggaagatggagcaattttgccccgggaacggccatggcaaccgcagccaacgacgccaccgacttctctcaggcccagctcatctttgcggggcccaacatcaccggcaacaccaccacagatgccaataacctgatgttcacttcagaagatgaacttagggccaccaacccccgggacactgacctgtttggccacctggcaaccaaccagcaaaacgccaccaccgttcctaccgtagacgacgtggacggagtcggcgtgtacccgggaatggtgtggcaggacagagacatttactaccaagggcccatttgggccaaaattccacacacggatggacactttcacccgtctcctctcattggcggatttggactgaaaagcccgcctccacaaatattcatcaaaaacactcctgtacccgccaatcccgcaacgaccttctctccggccagaatcaacagcttcatcacccagtacagcaccggacaggtggctgtcaaaatagaatgggaaatccagaaggagcggtccaagagatggaacccagaggtccagttcacgtccaactacggagcacaggactcgcttctctgggctcccgacaacgccggagcctacaaagagcccagggccattggatcccgatacctcaccaaccacctctag

SEQ ID NO: 518 - DNA, 1173 bp, Bovine adeno-associated virus
atggcgctggtaagctggctggtggaacatggcatcacttccgagaagcagtggattcaggagaatcaggagagctacctgtccttcaactccacgggaaactctcggagccagattaaagccgcgcttgacaacgcgtcaaaaattatgagtctgaccaaatctgcctcagactatctcgtgggacagactgttccagaggacatttctgaaaacagaatctggcagatttttgatctcaacggctacgacccggcatacgcgggctctgttctctacggctggtgcactcgcgcctttggaaagaggaacaccgtctggctgtatggacccgcgaccaccggaaagaccaacatcgcggaagccatctctcacaccgtgcccttttatggctgtgtgaactggactaatgagaactttccctttaatgactgtgtggaaaaaatgttgatctggtgggaggagggaaagatgaccagcaaggtggtggaacccgccaaggccatcttgggggggtctagagtacgagtggatcaaaaatgtaaatcctctgtacaagtagactctaccccggtgattatcacctccaatactaacatgtgtgtggtggtggatgggaactccacgacctttgaacaccagcagccgctggaagaccgcatgttcagatttgaactcatgcggcggctcccgccagattttggcaagattaccaagcaggaagtcaaagacttttttgcttgggcaaaggtcaaccaggtgccggtgactcacgagtttatggttcccaagaaagtggcgggaactgagagggcggagacttctagaaaacgcccactggatgacgtcaccaataccaactataaaagtccggagaagcgggcccggctctcagttgttcctgagacgcctcgcagttcagacgtgcctgtagagcccgctcctctgcgacctctcaactggtcttccaggtatgaatgcagatgtgactatcatgctaaatttgactctgtaacgggggaatgtgacgagtgtgaatatttgaatcggggcaaaaatggctgtatctttcataatgctacacattgtcaaatttgtcacgctgttcctccatgggaaaaggaaaatgtgtcagattttaatgattttgatgactgtaataaagagcagtaa

SEQ ID NO: 519 - DNA, 1833 bp, Bovine adeno-associated virus
atggctaccttctatgaagtcattgttcgcgttccatttgatgtggaagagcacctgcctggaatttctgacaactttgtagactgggtaactggtcaaatttgggagctgcctcccgagtcagatttgaatttgactctgattgagcagcctcagctgacggtggctgacagaattcgccgcgtgttcctgtacgagtggaacaaattttccaagcaggagagcaaattctttgtgcagtttgaaaagggatctgaatattttcatctgcacacgctcgtggagacctccggcatctcttctatggtccttggccgctacgtgagtcagattcgcgcccagctggtgaaggtggtgttccagaacattgagccgcggattaacgactgggtcgccatcaccaaggtaaagaagggcggagccaataaggtggtggattctgggtatattcccgcctacctgctgccgaaggtccaaccagagcttcagtgggcgtggactaacctcgaagagtataaattggccgccctcaatctggaggagcgcaaacggctcgtcgctcagtttcagcttgagtcctcgcagcgctcgcaagaggcatcttcccagagggacgtttcggctgacccggtcatcaagagcaagacttcccagaaatacatggcgctggtaagctggctggtggaacatggcatcacttccgagaagcagtggattcaggagaatcaggagagctacctgtccttcaactccacgggaaactctcggagccagattaaagccgcgcttgacaacgcgtcaaaaattatgagtctgaccaaatctgcctcagactatctcgtgggacagactgttccagaggacatttctgaaaacagaatctggcagatttttgatctcaacggctacgacccggcatacgcgggctctgttctctacggctggtgcactcgcgcctttggaaagaggaacaccgtctggctgtatggacccgcgaccaccggaaagaccaacatcgcggaagccatctctcacaccgtgcccttttatggctgtgtgaactggactaatgagaactttccctttaatgactgtgtggaaaaaatgttgatctggtgggaggagggaaagatgaccagcaaggtggtggaacccgccaaggccatcttgggggggtctagagtacgagtggatcaaaaatgtaaatcctctgtacaagtagactctaccccggtgattatcacctccaatactaacatgtgtgtggtggtggatgggaactccacgacctttgaacaccagcagccgctggaagaccgcatgttcagatttgaactcatgcggcggctcccgccagattttggcaagattaccaagcaggaagtcaaagacttttttgcttgggcaaaggtcaaccaggtgccggtgactcacgagtttatggttcccaagaaagtggcgggaactgagagggcggagacttctagaaaacgcccactggatgacgtcaccaataccaactataaaagtccggagaagcgggcccggctctcagttgttcctgagacgcctcgcagttcagacgtgcctgtagagcccgctcctctgcgacctctcaactggtcttccaggtatgaatgcagatgtgactatcatgctaaatttgactctgtaacgggggaatgtgacgagtgtgaatatttgaatcggggcaaaaatggctgtatctttcataatgctacacattgtcaaatttgtcacgctgttcctccatgggaaaaggaaaatgtgtcagattttaatgattttgatgactgtaataaagagcagtaa

SEQ ID NO: 520 - DNA, 2211 bp, Bovine adeno-associated virus
atgtcttttgttgaccaccctccagattggttggaatcgatcggcgacggctttcgtgaatttctcggccttgaggcgggtcccccgaaacccaaggccaatcaacagaagcaagataacgctcgaggtcttgtgcttcctgggtacaagtatcttggtcctgggaacggccttgataagggcgatcctgtcaattttgctgacgaggttgcccgagagcacgacctctcctaccagaaacagcttgaggcgggcgataacccttacctcaagtacaaccacgcggacgcagagtttcaggagaaactcgcttctgacacttcttttgggggaaaccttgggaaggctgttttccaggctaaaaagaggattctcgaacctcttggcctggttgagacgccggataaaacggcgcctgcggcaaaaaagaggcctctagagcagagtcctcaagagccagactcctcgagcggagttggcaagaaaggcaaacagcctgccagaaagagactcaactttgacgacgaacctggagccggagacgggcctcccccagaaggaccatcttccggagctatgtctactgagactgaaatgcgtgcagcagctggcggaaatggtggcgatgcgggacaaggtgccgagggagtgggtaatgcctccggtgattggcattgcgattccacttggtcagagagccacgtcaccaccacctcaacccgcacctgggtcctgccgacctacaacaaccacctgtacctgcggctcggctcgagcaacgccagcgacaccttcaacggattctccaccccctggggatactttgactttaaccgcttccactgccacttctcgccaagagactggcaaaggctcatcaacaaccactggggactgcgccccaaaagcatgcaagtccgcatcttcaacatccaagttaaggaggtcacgacgtctaacggggagacgaccgtatccaacaacctcaccagcacggtccagatctttgcggacagcacgtacgagctcccgtacgtgatggatgcaggtcaggagggcagcttgcctcctttccccaacgacgtgttcatggtgcctcagtacgggtactgcggactggtaaccggaggcagctctcaaaaccagacagacagaaatgccttctactgtctggagtactttcccagccagatgctgagaaccggaaacaactttgagatggtgtacaagtttgaaaacgtgcccttccactccatgtacgctcacagccagagcctggataggctgatgaacccgctgctggaccagtacctgtgggagctccagtctaccacctctggaggaactctcaaccagggcaattcagccaccaactttgccaagctgaccaaaacaaacttttctggctaccgcaaaaactggctcccggggcccatgatgaagcagcagagattctccaagactgccagtcaaaactacaagattccccagggaagaaacaacagtctgctccattatgagaccagaactaccctcgacggaagatggagcaattttgccccgggaacggccatggcaaccgcagccaacgacgccaccgacttctctcaggcccagctcatctttgcggggcccaacatcaccggcaacaccaccacagatgccaataacctgatgttcacttcagaagatgaacttagggccaccaacccccgggacactgacctgtttggccacctggcaaccaaccagcaaaacgccaccaccgttcctaccgtagacgacgtggacggagtcggcgtgtacccgggaatggtgtggcaggacagagacatttactaccaagggcccatttgggccaaaattccacacacggatggacactttcacccgtctcctctcattggcggatttggactgaaaagcccgcctccacaaatattcatcaaaaacactcctgtacccgccaatcccgcaacgaccttctctccggccagaatcaacagcttcatcacccagtacagcaccggacaggtggctgtcaaaatagaatgggaaatccagaaggagcggtccaagagatggaacccagaggtccagttcacgtccaactacggagcacaggactcgcttctctgggctcccgacaacgccggagcctacaaagagcccagggccattggatcccgatacctcaccaaccacctctag

SEQ ID NO: 521 - DNA, 4694 bp, Bovine adeno-associated virus
gtggcactcccccccctgtcgcgttcgctcgttcgctggctcgattgggggggtggcagctcaaagagctgccagacgacggccctctgggccgtcgcccccccaatcgagccagcgaacgagcgaacgcgacaggggggggagtgccacactctctagcaagggggttttgtaggtggtgatgtcattgttgatgtcattatagttgtcacgcgatagttaatgattaacagtcatgtgatgtgtgttatccaataggatgaaagcgcgcgaatgagatctcgcgagacttccggggtataaaaggggtgagtgaacgagcccgccgccattctctgctctggactgctagaggaccctcgctgccatggctaccttctatgaagtcattgttcgcgttccatttgatgtggaagagcacctgcctggaatttctgacaactttgtagactgggtaactggtcaaatttgggagctgcctcccgagtcagatttgaatttgactctgattgagcagcctcagctgacggtggctgacagaattcgccgcgtgttcctgtacgagtggaacaaattttccaagcaggagagcaaattctttgtgcagtttgaaaagggatctgaatattttcatctgcacacgctcgtggagacctccggcatctcttctatggtccttggccgctacgtgagtcagattcgcgcccagctggtgaaggtggtgttccagaacattgagccgcggattaacgactgggtcgccatcaccaaggtaaagaagggcggagccaataaggtggtggattctgggtatattcccgcctacctgctgccgaaggtccaaccagagcttcagtgggcgtggactaacctcgaagagtataaattggccgccctcaatctggaggagcgcaaacggctcgtcgctcagtttcagcttgagtcctcgcagcgctcgcaagaggcatcttcccagagggacgtttcggctgacccggtcatcaagagcaagacttcccagaaatacatggcgctggtaagctggctggtggaacatggcatcacttccgagaagcagtggattcaggagaatcaggagagctacctgtccttcaactccacgggaaactctcggagccagattaaagccgcgcttgacaacgcgtcaaaaattatgagtctgaccaaatctgcctcagactatctcgtgggacagactgttccagaggacatttctgaaaacagaatctggcagatttttgatctcaacggctacgacccggcatacgcgggctctgttctctacggctggtgcactcgcgcctttggaaagaggaacaccgtctggctgtatggacccgcgaccaccggaaagaccaacatcgcggaagccatctctcacaccgtgcccttttatggctgtgtgaactggactaatgagaactttccctttaatgactgtgtggaaaaaatgttgatctggtgggaggagggaaagatgaccagcaaggtggtggaacccgccaaggccatcttgggggggtctagagtacgagtggatcaaaaatgtaaatcctctgtacaagtagactctaccccggtgattatcacctccaatactaacatgtgtgtggtggtggatgggaactccacgacctttgaacaccagcagccgctggaagaccgcatgttcagatttgaactcatgcggcggctcccgccagattttggcaagattaccaagcaggaagtcaaagacttttttgcttgggcaaaggtcaaccaggtgccggtgactcacgagtttatggttcccaagaaagtggcgggaactgagagggcggagacttctagaaaacgcccactggatgacgtcaccaataccaactataaaagtccggagaagcgggcccggctctcagttgttcctgagacgcctcgcagttcagacgtgcctgtagagcccgctcctctgcgacctctcaactggtcttccaggtatgaatgcagatgtgactatcatgctaaatttgactctgtaacgggggaatgtgacgagtgtgaatatttgaatcggggcaaaaatggctgtatctttcataatgctacacattgtcaaatttgtcacgctgttcctccatgggaaaaggaaaatgtgtcagattttaatgattttgatgactgtaataaagagcagtaaataaagtgagtagtcatgtcttttgttgaccaccctccagattggttggaatcgatcggcgacggctttcgtgaatttctcggccttgaggcgggtcccccgaaacccaaggccaatcaacagaagcaagataacgctcgaggtcttgtgcttcctgggtacaagtatcttggtcctgggaacggccttgataagggcgatcctgtcaattttgctgacgaggttgcccgagagcacgacctctcctaccagaaacagcttgaggcgggcgataacccttacctcaagtacaaccacgcggacgcagagtttcaggagaaactcgcttctgacacttcttttgggggaaaccttgggaaggctgttttccaggctaaaaagaggattctcgaacctcttggcctggttgagacgccggataaaacggcgcctgcggcaaaaaagaggcctctagagcagagtcctcaagagccagactcctcgagcggagttggcaagaaaggcaaacagcctgccagaaagagactcaactttgacgacgaacctggagccggagacgggcctcccccagaaggaccatcttccggagctatgtctactgagactgaaatgcgtgcagcagctggcggaaatggtggcgatgcgggacaaggtgccgagggagtgggtaatgcctccggtgattggcattgcgattccacttggtcagagagccacgtcaccaccacctcaacccgcacctgggtcctgccgacctacaacaaccacctgtacctgcggctcggctcgagcaacgccagcgacaccttcaacggattctccaccccctggggatactttgactttaaccgcttccactgccacttctcgccaagagactggcaaaggctcatcaacaaccactggggactgcgccccaaaagcatgcaagtccgcatcttcaacatccaagttaaggaggtcacgacgtctaacggggagacgaccgtatccaacaacctcaccagcacggtccagatctttgcggacagcacgtacgagctcccgtacgtgatggatgcaggtcaggagggcagcttgcctcctttccccaacgacgtgttcatggtgcctcagtacgggtactgcggactggtaaccggaggcagctctcaaaaccagacagacagaaatgccttctactgtctggagtactttcccagccagatgctgagaaccggaaacaactttgagatggtgtacaagtttgaaaacgtgcccttccactccatgtacgctcacagccagagcctggataggctgatgaacccgctgctggaccagtacctgtgggagctccagtctaccacctctggaggaactctcaaccagggcaattcagccaccaactttgccaagctgaccaaaacaaacttttctggctaccgcaaaaactggctcccggggcccatgatgaagcagcagagattctccaagactgccagtcaaaactacaagattccccagggaagaaacaacagtctgctccattatgagaccagaactaccctcgacggaagatggagcaattttgccccgggaacggccatggcaaccgcagccaacgacgccaccgacttctctcaggcccagctcatctttgcggggcccaacatcaccggcaacaccaccacagatgccaataacctgatgttcacttcagaagatgaacttagggccaccaacccccgggacactgacctgtttggccacctggcaaccaaccagcaaaacgccaccaccgttcctaccgtagacgacgtggacggagtcggcgtgtacccgggaatggtgtggcaggacagagacatttactaccaagggcccatttgggccaaaattccacacacggatggacactttcacccgtctcctctcattggcggatttggactgaaaagcccgcctccacaaatattcatcaaaaacactcctgtacccgccaatcccgcaacgaccttctctccggccagaatcaacagcttcatcacccagtacagcaccggacaggtggctgtcaaaatagaatgggaaatccagaaggagcggtccaagagatggaacccagaggtccagttcacgtccaactacggagcacaggactcgcttctctgggctcccgacaacgccggagcctacaaagagcccagggccattggatcccgatacctcaccaaccacctctagcccaattctgttgcataccctcaataaaccgtgtattcgtttcagtaaaatactgcctcttgtggtcattcggcgtacaacagcttacaacaacaacaaaacccccttgctagagagtgtggcactcccccccctgtcgcgttcgctcgttcgctggctcgattgggggggtggcagctcaaagagctgccagacgacggccctctgggccgtcgcccccccaatcgagccagcgaacgagcgaacgcgacaggggggggagtgccac

SEQ ID NO: 522 - protein, 390 aa, Bovine adeno-associated virus
MALVSWLVEHGITSEKQWIQENQESYLSFNSTGNSRSQIKAALDNASKIMSLTKSASDYLVGQTVPEDISENRIWQIFDLNGYDPAYAGSVLYGWCTRAFGKRNTVWLYGPATTGKTNIAEAISHTVPFYGCVNWTNENFPFNDCVEKMLIWWEEGKMTSKVVEPAKAILGGSRVRVDQKCKSSVQVDSTPVIITSNTNMCVVVDGNSTTFEHQQPLEDRMFRFELMRRLPPDFGKITKQEVKDFFAWAKVNQVPVTHEFMVPKKVAGTERAETSRKRPLDDVTNTNYKSPEKRARLSVVPETPRSSDVPVEPAPLRPLNWSSRYECRCDYHAKFDSVTGECDECEYLNRGKNGCIFHNATHCQICHAVPPWEKENVSDFNDFDDCNKEQ

SEQ ID NO: 523 - protein, 610 aa, Bovine adeno-associated virus
MATFYEVIVRVPFDVEEHLPGISDNFVDWVTGQIWELPPESDLNLTLIEQPQLTVADRIRRVFLYEWNKFSKQESKFFVQFEKGSEYFHLHTLVETSGISSMVLGRYVSQIRAQLVKVVFQNIEPRINDWVAITKVKKGGANKVVDSGYIPAYLLPKVQPELQWAWTNLEEYKLAALNLEERKRLVAQFQLESSQRSQEASSQRDVSADPVIKSKTSQKYMALVSWLVEHGITSEKQWIQENQESYLSFNSTGNSRSQIKAALDNASKIMSLTKSASDYLVGQTVPEDISENRIWQIFDLNGYDPAYAGSVLYGWCTRAFGKRNTVWLYGPATTGKTNIAEAISHTVPFYGCVNWTNENFPFNDCVEKMLIWWEEGKMTSKVVEPAKAILGGSRVRVDQKCKSSVQVDSTPVIITSNTNMCVVVDGNSTTFEHQQPLEDRMFRFELMRRLPPDFGKITKQEVKDFFAWAKVNQVPVTHEFMVPKKVAGTERAETSRKRPLDDVTNTNYKSPEKRARLSVVPETPRSSDVPVEPAPLRPLNWSSRYECRCDYHAKFDSVTGECDECEYLNRGKNGCIFHNATHCQICHAVPPWEKENVSDFNDFDDCNKEQ

SEQ ID NO: 524 - protein, 538 aa, Bovine adeno-associated virus
MRAAAGGNGGDAGQGAEGVGNASGDWHCDSTWSESHVTTTSTRTWVLPTYNNHLYLRLGSSNASDTFNGFSTPWGYFDFNRFHCHFSPRDWQRLINNHWGLRPKSMQVRIFNIQVKEVTTSNGETTVSNNLTSTVQIFADSTYELPYVMDAGQEGSLPPFPNDVFMVPQYGYCGLVTGGSSQNQTDRNAFYCLEYFPSQMLRTGNNFEMVYKFENVPFHSMYAHSQSLDRLMNPLLDQYLWELQSTTSGGTLNQGNSATNFAKLTKTNFSGYRKNWLPGPMMKQQRFSKTASQNYKIPQGRNNSLLHYETRTTLDGRWSNFAPGTAMATAANDATDFSQAQLIFAGPNITGNTTTDANNLMFTSEDELRATNPRDTDLFGHLATNQQNATTVPTVDDVDGVGVYPGMVWQDRDIYYQGPIWAKIPHTDGHFHPSPLIGGFGLKSPPPQIFIKNTPVPANPATTFSPARINSFITQYSTGQVAVKIEWEIQKERSKRWNPEVQFTSNYGAQDSLLWAPDNAGAYKEPRAIGSRYLTNHL

SEQ ID NO: 525 - protein, 736 aa, Artificial Sequence
  Synthetic polypeptide
MSFVDHPPDWLESIGDGFREFLGLEAGPPKPKANQQKQDNARGLVLPGYKYLGPGNGLDKGDPVNFADEVAREHDLSYQKQLEAGDNPYLKYNHADAEFQEKLASDTSFGGNLGKAVFQAKKRILEPLGLVETPDKTAPAAKKRPLEQSPQEPDSSSGVGKKGKQPARKRLNFDDEPGAGDGPPPEGPSSGAMSTETEMRAAAGGNGGDAGQGAEGVGNASGDWHCDSTWSESHVTTTSTRTWVLPTYNNHLYLRLGSSNASDTFNGFSTPWGYFDFNRFHCHFSPRDWQRLINNHWGLRPKSMQVRIFNIQVKEVTTSNGETTVSNNLTSTVHIFADSTYELPYVMDAGQEGSLPPFPNDVFMVPQYGYCGLVTGGSSQNQTDRNAFYCLEYFPSQMLRTGNNFEMVYKFENVPFHSMYAHSQSLDRLMNPLLDQYLWELQSTTSGGTLNQGNSATNFAKLTNKNFSGYRKNWLPGPMMKQQRFSKTASQNYKIPQGGNNSLLHYETRTTLDRRWSNFAPGTAMATAANDATDFSQAQLIFAGPNITGNTTTDANNLMFTSEDELRATNPRDTDLFGHLATNQQNATTVPTVDDVDGVGVYPGMVWQDRDIYYQGPIWAKIPHTDGHFHPSPLIGGFGLKSPPPQIFIKNTPVPANPATTFSPARINSFITQYSTGQVAVKIEWEIQKERSKRWNPEVQFTSNYGAQDSLLWAPDNAGAYKEPRAIGSRYLTNHL

SEQ ID NO: 526 - protein, 736 aa, Artificial Sequence
  Synthetic polypeptide
MSFVDHPPDWLESIGDGFREFLGLEAGPPKPKANQQKQDNARGLVLPGYKYLGPGNGLDKGDPVNFADEVAREHDLSYQKQLEAGDNPYLKYNHADAEFQEKLASDTSFGGNLGKAVFQAKKRILEPLGLVETPDKTAPAAKKRPLEQSPQEPDSSSGVGKKGKQPARKRLNFDDEPGAGDGPPPEGPSSGAMSTETEMRAAAGGNGGDAGQGAEGVGNASGDWHCDSTWSESHVTTTSTRTWVLPTYNNHLYLRLGSSNASDTFNGFSTPWGYFDFNRFHCHFSPRDWQRLINNHWGLRPKSMQVRIFNIQVKEVTTSNGETTVSNNLTSTVQIFADSTYELPYVMDAGQEGSLPPFPNDVFMVPQYGYCGLVTGGSSQNQTDRNAFYCLEYFPSQMLRTGNNFEMVYKFENVPFHSMYAHSQSLDRLMNPLLDQYLWELQSTTSGGTLNQGNSATNFAKLTKTNFSGYRKNWLPGPMMKQQRFSKTASQNYKIPQGRNNSLLHYETRTTLDGRWSNFAPGTAMATAANDATDFSQAQLIFAGPNITGNTTTDANNLMFTSEDELRATNPRDTDLFGHLATNQQNATTVPTVDDVDGVGVYPGMVWQDRDIYYQGPIWAKIPHTDGHFHPSPLIGGFGLKSPPPQIFIKNTPVPANPATTFSPARINSFITQYSTGQVAVKIEWEIQKERSKRWNPEVQFTSNYGAQDSLLWAPDNAGAYKEPRAIGSRYLTNHL

SEQ ID NO: 527 - protein, 736 aa, Bovine adeno-associated virus; identical to SEQ ID NO: 526

SEQ ID NO: 528 - protein, 600 aa, Bovine adeno-associated virus
TAPAAKKRPLEQSPQEPDSSSGVGKKGKQPARKRLNFDDEPGAGDGPPPEGPSSGAMSTETEMRAAAGGNGGDAGQGAEGVGNASGDWHCDSTWSESHVTTTSTRTWVLPTYNNHLYLRLGSSNASDTFNGFSTPWGYFDFNRFHCHFSPRDWQRLINNHWGLRPKSMQVRIFNIQVKEVTTSNGETTVSNNLTSTVQIFADSTYELPYVMDAGQEGSLPPFPNDVFMVPQYGYCGLVTGGSSQNQTDRNAFYCLEYFPSQMLRTGNNFEMVYKFENVPFHSMYAHSQSLDRLMNPLLDQYLWELQSTTSGGTLNQGNSATNFAKLTKTNFSGYRKNWLPGPMMKQQRFSKTASQNYKIPQGRNNSLLHYETRTTLDGRWSNFAPGTAMATAANDATDFSQAQLIFAGPNITGNTTTDANNLMFTSEDELRATNPRDTDLFGHLATNQQNATTVPTVDDVDGVGVYPGMVWQDRDIYYQGPIWAKIPHTDGHFHPSPLIGGFGLKSPPPQIFIKNTPVPANPATTFSPARINSFITQYSTGQVAVKIEWEIQKERSKRWNPEVQFTSNYGAQDSLLWAPDNAGAYKEPRAIGSRYLTNHL

SEQ ID NO: 529 - DNA, 2214 bp, Artificial Sequence
  Synthetic polynucleotide
atggctgccgatggttatcttccagattggctcgaggacactctctctgaaggaataagacagtggtggaagctcaaacctggcccaccaccaccaaagcccgcagagcggcataaggacgacagcaggggtcttgtgcttcctgggtacaagtacctcggacccttcaacggactcgacaagggagagccggtcaacgaggcagacgccgcggccctcgagcacgacaaagcctacgaccggcagctcgacagcggagacaacccgtacctcaagtacaaccacgccgacgcggagtttcaggagcgccttaaagaagatacgtcttttgggggcaacctcgggcgagcagtcttccaggccaaaaagaggcttcttgaacctcttggtctggttgaggaagcggctaagacggctcctggaaagaagaggcctgtagagcagtctcctcaggaaccggactcctcctcgggcatcggcaagacaggccagcagcccgctaaaaagagactcaatttcggtcagactggcgacacagagtcagtcccagaccctcaaccaatcggagaacctcccgcagccccctcaggtgtgggatctcttacaatggcttcaggtggtggcgcaccagtggcagacaataacgaaggtgccgatggagtgggtagttcctcgggaaattggcattgcgattcccaatggctgggggacagagtcatcaccaccagcacccgaacctgggccctgcccacctacaacaatcacctctacaagcaaatctccaacgggacatcgggaggagccaccaacgacaacacctacttcggctacagcaccccctgggggtattttgactttaacagattccactgccacttttcaccacgtgactggcagcgactcatcaacaacaactggggattccggcccaagagactcagcttcaagctcttcaacatccaggtcaaggaggtcacgcagaatgaaggcaccaagaccatcgccaataaccttaccagcacggtccaggtcttcacggactcggagtaccagctgccgtacgttctcggctctgcccaccagggctgcctgcctccgttcccggcggacgtgttcatgattccccagtacggctacctaacactcaacaacggtagtcaggccgtgggacgctcctccttctactgcctggaatactttccttcgcagatgctgagaaccggcaacaacttccagtttacttacaccttcgaggacgtgcctttccacagcagctacgcccacagccagagcttggaccggctgatgaatcctctgattgaccagtacctgtactacttgtctcggactcaaacaacaggaggcacggcaaatacgcagactctgggcttcagccaaggtgggcctaatacaatggccaatcaggcaaagaactggctgccaggaccctgttaccgccaacaacgcgtctcaacgacaaccgggcaaaacaacaatagcaactttgcctggactgctgggaccaaataccatctgaatggaagaaattcattggctaatcctggcatcgctatggcaacacacaaagacgacaaggagcgtttttttcccagtaacgggatcctgatttttggcaaacaaaatgctgccagagacaatgcggattacagcgatgtcatgctcaccagcgaggaagaaatcaaaaccactaaccctgtggctacagaggaatacggtatcgtggcagataacttgcagcagcaaaacacggctcctcaaattggaactgtcaacagccagggggccttacccggtatggtttggcagaaccgggacgtgtacctgcagggtcccatctgggccaagattcctcacacggacggcaacttccacccgtctccgctgatgggcggctttggcctgaaacatcctccgcctcagatcctgatcaagaacacgcctgtacctgcggatcctccgaccaccttcaaccagtcaaagctgaactctttcatcacgcaatacagcaccggacaggtcagcgtggaaattgaatgggagctgcagaaggaaaacagcaagcgctggaaccccgagatccagtacacctccaactactacaaatctacaagtgtggactttgctgttaatacagaaggcgtgtactctgaaccccaccccattggcacccgttacctcacccgtcccctgtaa

SEQ ID NO: 530 - protein, 737 aa, Artificial Sequence
  Synthetic polypeptide
MAADGYLPDWLEDTLSEGIRQWWKLKPGPPPPKPAERHKDDSRGLVLPGYKYLGPFNGLDKGEPVNEADAAALEHDKAYDRQLDSGDNPYLKYNHADAEFQERLKEDTSFGGNLGRAVFQAKKRLLEPLGLVEEAAKTAPGKKRPVEQSPQEPDSSSGIGKTGQQPAKKRLNFGQTGDTESVPDPQPIGEPPAAPSGVGSLTMASGGGAPVADNNEGADGVGSSSGNWHCDSQWLGDRVITTSTRTWALPTYNNHLYKQISNGTSGGATNDNTYFGYSTPWGYFDFNRFHCHFSPRDWQRLINNNWGFRPKRLSFKLFNIQVKEVTQNEGTKTIANNLTSTVQVFTDSEYQLPYVLGSAHQGCLPPFPADVFMIPQYGYLTLNNGSQAVGRSSFYCLEYFPSQMLRTGNNFQFTYTFEDVPFHSSYAHSQSLDRLMNPLIDQYLYYLSRTQTTGGTANTQTLGFSQGGPNTMANQAKNWLPGPCYRQQRVSTTTGQNNNSNFAWTAGTKYHLNGRNSLANPGIAMATHKDDKERFFPSNGILIFGKQNAARDNADYSDVMLTSEEEIKTTNPVATEEYGIVADNLQQQNTAPQIGTVNSQGALPGMVWQNRDVYLQGPIWAKIPHTDGNFHPSPLMGGFGLKHPPPQILIKNTPVPADPPTTFNQSKLNSFITQYSTGQVSVEIEWELQKENSKRWNPEIQYTSNYYKSTSVDFAVNTEGVYSEPHPIGTRYLTRPL

SEQ ID NO: 531 - protein, 736 aa, Artificial Sequence
  Synthetic polypeptide
MAADGYLPDWLEDNLSEGIREWWDLKPGAPKPKANQQKQDDGRGLVLPGYKYLGPFNGLDKGEPVNAADAAALEHDKAYDQQLKAGDNPYLRYNHADAEFQERLQEDTSFGGNLGRAVFQAKKRVLEPLGLVEEGAKTAPGKKRPVEQSPQEPDSSSGIGKTGQQPAKKRLNFGQTGDTESVPDPQPIGEPPAAPSGVGSLTMASGGGAPVADNNEGADGVGSSSGNWHCDSQWLGDRVITTSTRTWALPTYNNHLYKQISSASTGASNDNHYFGYSTPWGYFDFNRFHCHFSPRDWQRLINNNWGFRPKRLNFKLFNIQVKEVTDNNGVKTIANNLTSTVQVFTDSDYQLPYVLGSAHQGCLPPFPADVFMIPQYGYLTLNNGSQAVGRSSFYCLEYFPSQMLRTGNNFQFTYTFEDVPFHSSYAHSQSLDRLMNPLIDQYLYYLSRTQTTGGTANTQTLGFSQGGPNTMANQAKNWLPGPCYRQQRVSTTTGQNNNSNFAWTAGTKYHLNGRNSLANPGIAMATHKDDKERFFPSNGILIFGKQNAARDNADYSDVMLTSEEEIKTTNPVATEEYGIVADNLQQQNTAPQIGTVNSQGALPGMVWQNRDVYLQGPIWAKIPHTDGNFHPSPLMGGFGLKHPPPQILIKNTPVPADPPTTFNQSKLNSFITQYSTGQVSVEIEWELQKENSKRWNPEIQYTSNYYKSTSVDFAVNTEGVYSEPHPIGTRYLTRPL

SEQ ID NO: 532 - protein, 736 aa, Artificial Sequence
  Synthetic polypeptide
MAADGYLPDWLEDTLSEGIRQWWKLKPGPPPPKPAERHKDDSRGLVLPGYKYLGPFNGLDKGEPVNEADAAALEHDKAYDRQLDSGDNPYLKYNHADAEFQERLQGDTSFGGNLGRAVFQAKKRVLEPLGLVEEGAKTAPGKKRPVEQSPQEPDSSSGIGETGQQPAKKRLNFGQTGDSESVPDPQPLGEPPATPAAVGPTTMASGGGAPMADNNEGADGVGSSSGNWHCDSQWLGDRVITTSTRTWALPTYNNHLYKQISSASTGASNDNHYFGYSTPWGYFDFNRFHCHFSPRDWQRLINNNWGFRPKRLSFKLFNIQVKEVTDNNGVKTIANNLTSTVQVFTDSEYQLPYVLGSAHQGCLPPFPADVFMIPQYGYLTLNNGSQAVGRSSFYCLEYFPSQMLRTGNNFTFSYTFEDVPFHSSYAHSQSLDRLMNPLIDQYLYYLSRTQTTGGTANTQTLGFSQGGPNTMANQAKNWLPGPCYRQQRVSTTTGQNNNSNFAWTAGTKYHLNGRNSLANPGIAMATHKDDKERFFPSNGILIFGKQNAARDNADYSDVMLTSEEEIKTTNPVATEEYGIVADNLQQQNTAPQIGTVNSQGALPGMVWQNRDVYLQGPIWAKIPHTDGNFHPSPLMGGFGLKHPPPQILIKNTPVPADPPTTFNQSKLNSFITQYSTGQVSVEIEWELQKENSKRWNPEIQYTSNYYKSTSVDFAVNTEGVYSEPHPIGTRYLTRPL

SEQ ID NO: 533 - DNA, 2181 bp, Artificial Sequence
  Synthetic polynucleotide
atgtcttttgttgatcaccctccagattggttggaagaagttggtgaaggtcttcgcgagtttttgggccttgaagcgggcccaccgaaaccaaaacccaatcagcagcatcaagatcaagcccgtggtcttgtgctgcctggttataactatctcggacccggaaacggtctcgatcgaggagagcctgtcaacagggcagacgaggtcgcgcgagagcacgacatctcgtacaacgagcagcttgaggcgggagacaacccctacctcaagtacaaccacgcggacgccgagtttcaggagaagctcgccgacgacacatccttcgggggaaacctcggaaaggcagtctttcaggccaagaaaagggttctcgaaccttttggcctggttgaagagggtgctaagacggcccctaccggaaagcggatagacgaccactttccaaaaagaaagaaggctcggaccgaagaggactccaagccttccacctcgtcagacgccgaagctggacccagcggatcccagcagctgcaaatcccagcacaaccagcctcaagtttgggagctgatacaatgtctgcgggaggtggcggcccattgggcgacaataaccaaggtgccgatggagtgggcaatgcctcgggagattggcattgcgattccacgtggatgggggacagagtcgtcaccaagtccacccgcacctgggtgctgcccagctacaacaaccaccagtaccgagagatcaaaagcggctccgtcgacggaagcaacgccaacgcctactttggatacagcaccccctgggggtactttgactttaaccgcttccacagccactggagcccccgagactggcaaagactcatcaacaactattggggcttcagaccccggtctctcagagtcaaaatcttcaacatccaagtcaaagaggtcacggtgcaggactccaccaccaccatcgccaacaacctcacctccaccgtccaagtgtttacggacgacgactaccaactcccgtacgtcgtcggcaacgggaccgagggatgcctgccggccttccccccgcaggtctttacgctgccgcagtacggctacgcgacgctgaaccgagacaacggagacaacccgacagagcggagcagcttcttttgcctagagtactttcccagcaagatgctgaggacgggcaacaactttgagtttacctacagctttgaagaggtgcccttccactgcagcttcgccccgagccagaacctctttaagctggccaacccgctggtggaccagtacctgtaccgcttcgtgagcacctcggccacgggcgccatccagttccaaaagaacctggcgggcagatacgccaacacctacaaaaactggttcccggggcccatgggccgaacccagggctggaacacgagctctggggtcagcagcaccaacagagtcagcgtcaacaacttttccgtctcaaaccggatgaacctggagggggccagctaccaagtgaacccccagcccaacgggatgacaaacacgctccaaggcagcaaccgctacgcgctggaaaacaccatgatcttcaacgctcaaaacgccacgccgggaactacctcggtgtacccagaggacaatctactgctgaccagcgagagcgagactcagcccgtcaaccgggtggcttacaacacgggcggtcagatggccaccaacgcccagaacgccaccacggctcccacggtcgggacctacaacctccaggaagtgcttcctggcagcgtatggatggagagggacgtgtacctccaaggacccatctgggccaagatcccagagacgggggcgcactttcacccctctccggccatgggcggattcggactcaaacacccgccgcccatgatgctcatcaaaaacacgccggtgcccggcaacatcaccagcttctcggacgtgcccgtcagcagcttcatcacccagtacagcaccgggcaggtcaccgtggagatggaatgggagctcaaaaaggaaaactccaagaggtggaacccagagatccagtacaccaacaactacaacgacccccagtttgtggactttgctccagacggctccggcgaatacagaaccaccagagccatcggaacccgatacctcacccgacccctt

SEQ ID NO: 534 - protein, 726 aa, Artificial Sequence
  Synthetic polypeptide
MSFVDHPPDWLEEVGEGLREFLGLEAGPPKPKPNQQHQDQARGLVLPGYNYLGPGNGLDRGEPVNRADEVAREHDISYNEQLEAGDNPYLKYNHADAEFQEKLADDTSFGGNLGKAVFQAKKRVLEPFGLVEEGAKTAPTGKRIDDHFPKRKKARTEEDSKPSTSSDAEAGPSGSQQLQIPAQPASSLGADTMSAGGGGPLGDNNQGADGVGNASGDWHCDSTWMGDRVVTKSTRTWVLPSYNNHQYREIKSGSVDGSNANAYFGYSTPWGYFDFNRFHSHWSPRDWQRLINNYWGFRPRSLRVKIFNIQVKEVTVQDSTTTIANNLTSTVQVFTDDDYQLPYVVGNGTEGCLPAFPPQVFTLPQYGYATLNRDNGDNPTERSSFFCLEYFPSKMLRTGNNFEFTYSFEEVPFHCSFAPSQNLFKLANPLVDQYLYRFVSTSATGAIQFQKNLAGRYANTYKNWFPGPMGRTQGWNTSSGSSTNRVSVNNFSVSNRMNLEGASYQVNPQPNGMTNTLQGSNRYALENTMIFNAQNATPGTTSVYPEDNLLLTSESETQPVNRVAYNTGGQMATNAQNATTAPTVGTYNLQEVLPGSVWMERDVYLQGPIWAKIPETGAHFHPSPAMGGFGLKHPPPMMLIKNTPVPGNITSFSDVPVSSFITQYSTGQVTVEMEWELKKENSKRWNPEIQYTNNYNDPQFVDFAPDGSGEYRTTRAIGTRYLTRPL

SEQ ID NO: 535 - protein, 735 aa, Artificial Sequence
  Synthetic polypeptide
MAADGYLPDWLEDTLSEGIRQWWKLKPGPPPPKPAERHKDDSRGLVLPGYKYLGPFNGLDKGEPVNEADAAALEHDKAYDRQLDSGDNPYLKYNHADAEFQERLKEDTSFGGNLGRAVFQAKKRILEPLGLVEEPVKTAPGKKRPVEHSPAEPDSSSGTGKSGQQPARKRLNFGQTGDADSVPDPQPLGQPPAAPSGLGTNTMASGSGAPMADNNEGADGVGNSSGNWHCDSTWMGDRVITTSTRTWALPTYNNHLYKQISSQSGASNDNHYFGYSTPWGYFDFNRFHCHFSPRDWQRLINNNWGFRPKRLSFKLFNIQVKEVTQNDGTTTIANNLTSTVQVFTDSEYQLPYVLGSAHQGCLPPFPADVFMVPQYGYLTLNNGSQAVGRSSFYCLEYFPSQMLRTGNNFTFSYTFEDVPFHSSYAHSQSLDRLMNPLIDQYLYYLSRTNTPSGTTTMSRLQFSQAGASDIRDQSRNWLPGPCYRQQRVSKTAADNNNSDYSWTGATKYHLNGRDSLVNPGPAMASHKDDEEKYFPQSGVLIFGKQDSGKTNVDIEKVMITDEEEIRTTNPVATEQYGSVSTNLQSGNTQAATSDVNTQGVLPGMVWQDRDVYLQGPIWAKIPHTDGHFHPSPLMGGFGLKHPPPQILIKNTPVPANPSTTFSAAKFASFITQYSTGQVSVEIEWELQKENSKRWNPEIQYTSNYNKSVNVDFTVDTNGVYSEPRPIGTRYLTRNL

SEQ ID NO: 536 - DNA, 1797 bp, Artificial Sequence
  Synthetic polynucleotide
acggctccgaccggagacaagcggaaaggcgaagacgaacctcgtttgcccgacacttcttcacagactcccaagaaaaacaagaagcctcgcaaggaaagaccttccggcggggcagaagatccgggcgaaggcacctcttccaacgctggagcagcagcacccgcctctagtgtgggatcatctatcatggctgaaggaggtggcggcccagtgggcgatgcaggccagggtgccgatggagtgggcaattcctccggaaattggcattgcgattcccaatggctggaaaacggagtcgtcactcgaaccacccgaacctgggtcttgcccagctacaacaaccacctgtacaaacgaatccaaggacccagcggaggcgacaacaacaacaaattctttggattcagcaccccctggggatactttgactacaatcgattccactgccacttttccccgcgagactggcaacgactcatcaacaacaactggggcatccgtcccaaagcgatgcgctttagactctttaacatccaggttaaagaggtcacggtccaagacttcaacaccaccatcggcaacaacctcaccagtacggtccaggtctttgcggacaaggactaccaactgccgtacgtcctcggatcggctaccgaaggcaccttcccgccgttcccagcggatatctacacgatcccgcagtacgggtactgcacgctaaactacaacaacgaggcggtggatcgttcggccttctactgtctggactactttccctcagacatgctgcggacaggaaataactttgagtttacttacaccttcgaggacgttcctttccatagcatgtttgcccacaaccagacgctagaccggctgatgaatcccctcgtggatcagtacctctgggctttcagctccgtcagccaagcaggctcatctggacgagctcttcattactcgcgggcgactaaaaccaacatggcggctcaatataggaactggttacctgggcctttcttccgtgatcagcaaatctttacgggcgctagcaacatcactaaaaataacgtctttagcgtttgggaaaaaggcaagcaatgggaactcgacaatcggaccaacctaatgcagcccggtcctgcggcagcgaccacctttagcggagaacctgaccgtcaagccatgcaaaacacgctggcttttagcaggaccgtctacgatcaaacgaccgccacgaccgatcgtaaccagatactcatcaccaacgaagacgaaatcagacccaccaactcggtcggtatcgacgcgtggggagcagttcccaccaacaaccagtcgatcgtgacccccggcactcgcgcggccgtcaacaatcaaggggcgcttcccgggatggtgtggcaaaacagagacatttaccctacagggacccatttggccaaaattcccgacactgacaatcacttccatccgtccccgcttattgggcggtttggctgcaagcatccccctccccagattttcattaaaaacacacccgtccctgccaacccttcggaaacgttccagacggccaaagtggcctccttcatcaaccagtactcgaccggacagtgcaccgtcgaaatcttttgggaactcaagaaggaaacctccaagcgctggaaccccgaaatccagttcacctccaactttggcaacgcggccgacatccagtttgccgtctccgacacgggatcctattccgaacctcgtcccatcggtacccgttaccttaccaaacctctgtaa

SEQ ID NO: 537 - DNA, 1989 bp, Artificial Sequence
  Synthetic polynucleotide
atgaggtcgtactacgaggtcatcgttcagctgcccaacgacgtcgagagtcaggtacctggaatctccgattcgttcgtcaactggattacgtcgcgagaatggacgttgcctgaggacgccgattgggatttggaccaggtcgatcaagttcaactgacgctcggcgacaaaatccaacgggagattcgaactcattgggggacgatggccaaagaaccggactttcactattttatccaactggaacaaggtgaggtgttctttcatttacacgtcctgctggaaacgtgttccgtaaagccgatggtactcggaagatatatccgacatattcaacaaaaaattgtgagtaaagtctactgcgccacgagcctacgatggaaggatggatgcgtggtgaccaagaccaaaaatttcgggggcgcgaacaaggtccgggccgagtcgtatattcccgcctacctgatcccgaaacagcaaccggaagtgcagtgggcgtggactaacgtgcccgagtatataaaagcgtgcttgcaccgagaactgcgtgccagtctcgcgcgacttcacttcgaggaggcgggcgtctcgcaatccaaggaaaatctcgcgagaactgcagacggcgctcccgtgatgccgacccgcgtcagcaaacgctacatggagctcgtggattggctcgtggagaaggggatcaccaccgagaaggaatggctgctggaaaacagagaaagctttcggagctttcaggcctcgagcaactcggcgcgtcagatcaagacggccctgcaaggcgccattcaggagatgcttctgaccaagacggcggaggactacctcgtcggaaaggatcccgtctcggacgacgacatccgtcagaaccgcatctacaagattctggaactgaaccactacgacccagcgtacgtggggagtattttggtcgggtggtgccagaagaaatggggcaagcgaaacacgctgtggctgttcggacatgcgaccaccggcaagaccaacatcgcggaggctattgcccatgctgtgccgttctatggatgcgttaactggaccaacgagaactttccgttcaacgactgcgtcgaaaaaatgattatctggtgggaggagggcaaaatgaccgccaaagtggtggaaacagccaaggcgattctgggaggatctcgggtgagagtggaccaaaaatgcaaagcttcggttccgatcgaaccgacgccggtcattattaccagtaacaccaacatgtgttatgtcatcgacgggaacacgaccacgttcgagcataagcagccgttggaggacaggatgtttaagctcgaattgctgactcggttgcctgatgactttggtaaggtgaccaaacaggaggtgcgtcaattcttcaggtggtctcaggatcacctgacccctgtgatcccagaattcctagtgcggaaggcggagtctcgcaaaagacccgccccttccggggaaggctatataagcccgacaaagcggcccgcgctcgcagagcagcagcaggcgtcggagagcgcggacccggttcccaccaggtatcgtatcaaatgctcgaaacattgcggtatggataaaatgttgtttccttgccaaatttgtgaatcgatgaacagagatattaatatttgtgctattcataaaacgaccgactgtaaagagtgtttccccgactacggggataaagatgatgtagaactacccccctgtacagaacacaacgtgtctcgttgttatcaatgtcattcgggcgaattgtatcgcgtgacttcggactctgacgagaaacctgcccccgagagtgatgaaggcaccgagccatcctatgctccctgcacgattcaccacctgatgggcaagagtcacgggttagtcacttgcgcggcgtgtcggttgaaaaatagtacgttgcatgatgacttggatgacggtgatctcgaacaataa

SEQ ID NO: 538 - DNA, 1626 bp, Artificial Sequence
  Synthetic polynucleotide
atgaggtcgtactacgaggtcatcgttcagctgcccaacgacgtcgagagtcaggtacctggaatctccgattcgttcgtcaactggattacgtcgcgagaatggacgttgcctgaggacgccgattgggatttggaccaggtcgatcaagttcaactgacgctcggcgacaaaatccaacgggagattcgaactcattgggggacgatggccaaagaaccggactttcactattttatccaactggaacaaggtgaggtgttctttcatttacacgtcctgctggaaacgtgttccgtaaagccgatggtactcggaagatatatccgacatattcaacaaaaaattgtgagtaaagtctactgcgccacgagcctacgatggaaggatggatgcgtggtgaccaagaccaaaaatttcgggggcgcgaacaaggtccgggccgagtcgtatattcccgcctacctgatcccgaaacagcaaccggaagtgcagtgggcgtggactaacgtgcccgagtatataaaagcgtgcttgcaccgagaactgcgtgccagtctcgcgcgacttcacttcgaggaggcgggcgtctcgcaatccaaggaaaatctcgcgagaactgcagacggcgctcccgtgatgccgacccgcgtcagcaaacgctacatggagctcgtggattggctcgtggagaaggggatcaccaccgagaaggaatggctgctggaaaacagagaaagctttcggagctttcaggcctcgagcaactcggcgcgtcagatcaagacggccctgcaaggcgccattcaggagatgcttctgaccaagacggcggaggactacctcgtcggaaaggatcccgtctcggacgacgacatccgtcagaaccgcatctacaagattctggaactgaaccactacgacccagcgtacgtggggagtattttggtcgggtggtgccagaagaaatggggcaagcgaaacacgctgtggctgttcggacatgcgaccaccggcaagaccaacatcgcggaggctattgcccatgctgtgccgttctatggatgcgttaactggaccaacgagaactttccgttcaacgactgcgtcgaaaaaatgattatctggtgggaggagggcaaaatgaccgccaaagtggtggaaacagccaaggcgattctgggaggatctcgggtgagagtggaccaaaaatgcaaagcttcggttccgatcgaaccgacgccggtcattattaccagtaacaccaacatgtgttatgtcatcgacgggaacacgaccacgttcgagcataagcagccgttggaggacaggatgtttaagctcgaattgctgactcggttgcctgatgactttggtaaggtgaccaaacaggaggtgcgtcaattcttcaggtggtctcaggatcacctgacccctgtgatcccagaattcctagtgcggaaggcggagtctcgcaaaagacccgccccttccggggaaggctatataagcccgacaaagcggcccgcgctcgcagagcagcagcaggcgtcggagagcgcggacccggttcccaccagattggttggagcggttggtcaaaaagggagtgaatgctgcagctga

SEQ ID NO: 539 - DNA, 1323 bp, Artificial Sequence
  Synthetic polynucleotide
atggagctcgtggattggctcgtggagaaggggatcaccaccgagaaggaatggctgctggaaaacagagaaagctttcggagctttcaggcctcgagcaactcggcgcgtcagatcaagacggccctgcaaggcgccattcaggagatgcttctgaccaagacggcggaggactacctcgtcggaaaggatcccgtctcggacgacgacatccgtcagaaccgcatctacaagattctggaactgaaccactacgacccagcgtacgtggggagtattttggtcgggtggtgccagaagaaatggggcaagcgaaacacgctgtggctgttcggacatgcgaccaccggcaagaccaacatcgcggaggctattgcccatgctgtgccgttctatggatgcgttaactggaccaacgagaactttccgttcaacgactgcgtcgaaaaaatgattatctggtgggaggagggcaaaatgaccgccaaagtggtggaaacagccaaggcgattctgggaggatctcgggtgagagtggaccaaaaatgcaaagcttcggttccgatcgaaccgacgccggtcattattaccagtaacaccaacatgtgttatgtcatcgacgggaacacgaccacgttcgagcataagcagccgttggaggacaggatgtttaagctcgaattgctgactcggttgcctgatgactttggtaaggtgaccaaacaggaggtgcgtcaattcttcaggtggtctcaggatcacctgacccctgtgatcccagaattcctagtgcggaaggcggagtctcgcaaaagacccgccccttccggggaaggctatataagcccgacaaagcggcccgcgctcgcagagcagcagcaggcgtcggagagcgcggacccggttcccaccaggtatcgtatcaaatgctcgaaacattgcggtatggataaaatgttgtttccttgccaaatttgtgaatcgatgaacagagatattaatatttgtgctattcataaaacgaccgactgtaaagagtgtttccccgactacggggataaagatgatgtagaactacccccctgtacagaacacaacgtgtctcgttgttatcaatgtcattcgggcgaattgtatcgcgtgacttcggactctgacgagaaacctgcccccgagagtgatgaaggcaccgagccatcctatgctccctgcacgattcaccacctgatgggcaagagtcacgggttagtcacttgcgcggcgtgtcggttgaaaaatagtacgttgcatgatgacttggatgacggtgatctcgaacaataa

SEQ ID NO: 540 - DNA, 960 bp, Artificial Sequence
  Synthetic polynucleotide
atggagctcgtggattggctcgtggagaaggggatcaccaccgagaaggaatggctgctggaaaacagagaaagctttcggagctttcaggcctcgagcaactcggcgcgtcagatcaagacggccctgcaaggcgccattcaggagatgcttctgaccaagacggcggaggactacctcgtcggaaaggatcccgtctcggacgacgacatccgtcagaaccgcatctacaagattctggaactgaaccactacgacccagcgtacgtggggagtattttggtcgggtggtgccagaagaaatggggcaagcgaaacacgctgtggctgttcggacatgcgaccaccggcaagaccaacatcgcggaggctattgcccatgctgtgccgttctatggatgcgttaactggaccaacgagaactttccgttcaacgactgcgtcgaaaaaatgattatctggtgggaggagggcaaaatgaccgccaaagtggtggaaacagccaaggcgattctgggaggatctcgggtgagagtggaccaaaaatgcaaagcttcggttccgatcgaaccgacgccggtcattattaccagtaacaccaacatgtgttatgtcatcgacgggaacacgaccacgttcgagcataagcagccgttggaggacaggatgtttaagctcgaattgctgactcggttgcctgatgactttggtaaggtgaccaaacaggaggtgcgtcaattcttcaggtggtctcaggatcacctgacccctgtgatcccagaattcctagtgcggaaggcggagtctcgcaaaagacccgccccttccggggaaggctatataagcccgacaaagcggcccgcgctcgcagagcagcagcaggcgtcggagagcgcggacccggttcccaccagattggttggagcggttggtcaaaaagggagtgaatgctgcagctga

SEQ ID NO: 541 - DNA, 1608 bp, Artificial Sequence
  Synthetic polynucleotide
atggctgaaggaggtggcggcccagtgggcgatgcaggccagggtgccgatggagtgggcaattcctccggaaattggcattgcgattcccaatggctggaaaacggagtcgtcactcgaaccacccgaacctgggtcttgcccagctacaacaaccacctgtacaaacgaatccaaggacccagcggaggcgacaacaacaacaaattctttggattcagcaccccctggggatactttgactacaatcgattccactgccacttttccccgcgagactggcaacgactcatcaacaacaactggggcatccgtcccaaagcgatgcgctttagactctttaacatccaggttaaagaggtcacggtccaagacttcaacaccaccatcggcaacaacctcaccagtacggtccaggtctttgcggacaaggactaccaactgccgtacgtcctcggatcggctaccgaaggcaccttcccgccgttcccagcggatatctacacgatcccgcagtacgggtactgcacgctaaactacaacaacgaggcggtggatcgttcggccttctactgtctggactactttccctcagacatgctgcggacaggaaataactttgagtttacttacaccttcgaggacgttcctttccatagcatgtttgcccacaaccagacgctagaccggctgatgaatcccctcgtggatcagtacctctgggctttcagctccgtcagccaagcaggctcatctggacgagctcttcattactcgcgggcgactaaaaccaacatggcggctcaatataggaactggttacctgggcctttcttccgtgatcagcaaatctttacgggcgctagcaacatcactaaaaataacgtctttagcgtttgggaaaaaggcaagcaatgggaactcgacaatcggaccaacctaatgcagcccggtcctgcggcagcgaccacctttagcggagaacctgaccgtcaagccatgcaaaacacgctggcttttagcaggaccgtctacgatcaaacgaccgccacgaccgatcgtaaccagatactcatcaccaacgaagacgaaatcagacccaccaactcggtcggtatcgacgcgtggggagcagttcccaccaacaaccagtcgatcgtgacccccggcactcgcgcggccgtcaacaatcaaggggcgcttcccgggatggtgtggcaaaacagagacatttaccctacagggacccatttggccaaaattcccgacactgacaatcacttccatccgtccccgcttattgggcggtttggctgcaagcatccccctccccagattttcattaaaaacacacccgtccctgccaacccttcggaaacgttccagacggccaaagtggcctccttcatcaaccagtactcgaccggacagtgcaccgtcgaaatcttttgggaactcaagaaggaaacctccaagcgctggaaccccgaaatccagttcacctccaactttggcaacgcggccgacatccagtttgccgtctccgacacgggatcctattccgaacctcgtcccatcggtacccgttaccttaccaaacctctgtaa

SEQ ID NO: 542 - DNA, 2232 bp, Artificial Sequence
  Synthetic polynucleotide
atgtctctcatttctgatgcgattccagattggttggagcggttggtcaaaaagggagtgaatgctgcagctgatttctaccatttggaaagcggtcctcctcgtcctaaggcaaatcagcaaactcaagaatctcttgaaaaggacgattcgagaggtctcgtgttcccaggctacaattatctaggccctttcaacggtctagataaaggagaacccgtcaacgaggcagacgctgccgccttagaacacgacaaggcttacgacctcgaaatcaaggacgggcacaacccgtactttgagtacaacgaggccgacagacgtttccaggaacgtctcaaagacgatacctcctttggaggcaatttaggtaaagccatcttccaggccaaaaagagggttctcgaaccctttggtctggtggaagactcaaagacggctccgaccggagacaagcggaaaggcgaagacgaacctcgtttgcccgacacttcttcacagactcccaagaaaaacaagaagcctcgcaaggaaagaccttccggcggggcagaagatccgggcgaaggcacctcttccaacgctggagcagcagcacccgcctctagtgtgggatcatctatcatggctgaaggaggtggcggcccagtgggcgatgcaggccagggtgccgatggagtgggcaattcctccggaaattggcattgcgattcccaatggctggaaaacggagtcgtcactcgaaccacccgaacctgggtcttgcccagctacaacaaccacctgtacaaacgaatccaaggacccagcggaggcgacaacaacaacaaattctttggattcagcaccccctggggatactttgactacaatcgattccactgccacttttccccgcgagactggcaacgactcatcaacaacaactggggcatccgtcccaaagcgatgcgctttagactctttaacatccaggttaaagaggtcacggtccaagacttcaacaccaccatcggcaacaacctcaccagtacggtccaggtctttgcggacaaggactaccaactgccgtacgtcctcggatcggctaccgaaggcaccttcccgccgttcccagcggatatctacacgatcccgcagtacgggtactgcacgctaaactacaacaacgaggcggtggatcgttcggccttctactgtctggactactttccctcagacatgctgcggacaggaaataactttgagtttacttacaccttcgaggacgttcctttccatagcatgtttgcccacaaccagacgctagaccggctgatgaatcccctcgtggatcagtacctctgggctttcagctccgtcagccaagcaggctcatctggacgagctcttcattactcgcgggcgactaaaaccaacatggcggctcaatataggaactggttacctgggcctttcttccgtgatcagcaaatctttacgggcgctagcaacatcactaaaaataacgtctttagcgtttgggaaaaaggcaagcaatgggaactcgacaatcggaccaacctaatgcagcccggtcctgcggcagcgaccacctttagcggagaacctgaccgtcaagccatgcaaaacacgctggcttttagcaggaccgtctacgatcaaacgaccgccacgaccgatcgtaaccagatactcatcaccaacgaagacgaaatcagacccaccaactcggtcggtatcgacgcgtggggagcagttcccaccaacaaccagtcgatcgtgacccccggcactcgcgcggccgtcaacaatcaaggggcgcttcccgggatggtgtggcaaaacagagacatttaccctacagggacccatttggccaaaattcccgacactgacaatcacttccatccgtccccgcttattgggcggtttggctgcaagcatccccctccccagattttcattaaaaacacacccgtccctgccaacccttcggaaacgttccagacggccaaagtggcctccttcatcaaccagtactcgaccggacagtgcaccgtcgaaatcttttgggaactcaagaaggaaacctccaagcgctggaaccccgaaatccagttcacctccaactttggcaacgcggccgacatccagtttgccgtctccgacacgggatcctattccgaacctcgtcccatcggtacccgttaccttaccaaacctctgtaa

SEQ ID NO: 543 - protein, 535 aa, Artificial Sequence
  Synthetic polypeptide
MAEGGGGPVGDAGQGADGVGNSSGNWHCDSQWLENGVVTRTTRTWVLPSYNNHLYKRIQGPSGGDNNNKFFGFSTPWGYFDYNRFHCHFSPRDWQRLINNNWGIRPKAMRFRLFNIQVKEVTVQDFNTTIGNNLTSTVQVFADKDYQLPYVLGSATEGTFPPFPADIYTIPQYGYCTLNYNNEAVDRSAFYCLDYFPSDMLRTGNNFEFTYTFEDVPFHSMFAHNQTLDRLMNPLVDQYLWAFSSVSQAGSSGRALHYSRATKTNMAAQYRNWLPGPFFRDQQIFTGASNITKNNVFSVWEKGKQWELDNRTNLMQPGPAAATTFSGEPDRQAMQNTLAFSRTVYDQTTATTDRNQILITNEDEIRPTNSVGIDAWGAVPTNNQSIVTPGTRAAVNNQGALPGMVWQNRDIYPTGTHLAKIPDTDNHFHPSPLIGRFGCKHPPPQIFIKNTPVPANPSETFQTAKVASFINQYSTGQCTVEIFWELKKETSKRWNPEIQFTSNFGNAADIQFAVSDTGSYSEPRPIGTRYLTKPL

SEQ ID NO: 544 - protein, 440 aa, Artificial Sequence
  Synthetic polypeptide
MELVDWLVEKGITTEKEWLLENRESFRSFQASSNSARQIKTALQGAIQEMLLTKTAEDYLVGKDPVSDDDIRQNRIYKILELNHYDPAYVGSILVGWCQKKWGKRNTLWLFGHATTGKTNIAEAIAHAVPFYGCVNWTNENFPFNDCVEKMIIWWEEGKMTAKVVETAKAILGGSRVRVDQKCKASVPIEPTPVIITSNTNMCYVIDGNTTTFEHKQPLEDRMFKLELLTRLPDDFGKVTKQEVRQFFRWSQDHLTPVIPEFLVRKAESRKRPAPSGEGYISPTKRPALAEQQQASESADPVPTRYRIKCSKHCGMDKMLFPCQICESMNRDINICAIHKTTDCKECFPDYGDKDDVELPPCTEHNVSRCYQCHSGELYRVTSDSDEKPAPESDEGTEPSYAPCTIHHLMGKSHGLVTCAACRLKNSTLHDDLDDGDLEQ

SEQ ID NO: 545 - protein, 319 aa, Artificial Sequence
  Synthetic polypeptide
MELVDWLVEKGITTEKEWLLENRESFRSFQASSNSARQIKTALQGAIQEMLLTKTAEDYLVGKDPVSDDDIRQNRIYKILELNHYDPAYVGSILVGWCQKKWGKRNTLWLFGHATTGKTNIAEAIAHAVPFYGCVNWTNENFPFNDCVEKMIIWWEEGKMTAKVVETAKAILGGSRVRVDQKCKASVPIEPTPVIITSNTNMCYVIDGNTTTFEHKQPLEDRMFKLELLTRLPDDFGKVTKQEVRQFFRWSQDHLTPVIPEFLVRKAESRKRPAPSGEGYISPTKRPALAEQQQASESADPVPTRLVGAVGQKGSECCS

SEQ ID NO: 546 - protein, 662 aa, Artificial Sequence
  Synthetic polypeptide
MRSYYEVIVQLPNDVESQVPGISDSFVNWITSREWTLPEDADWDLDQVDQVQLTLGDKIQREIRTHWGTMAKEPDFHYFIQLEQGEVFFHLHVLLETCSVKPMVLGRYIRHIQQKIVSKVYCATSLRWKDGCVVTKTKNFGGANKVRAESYIPAYLIPKQQPEVQWAWTNVPEYIKACLHRELRASLARLHFEEAGVSQSKENLARTADGAPVMPTRVSKRYMELVDWLVEKGITTEKEWLLENRESFRSFQASSNSARQIKTALQGAIQEMLLTKTAEDYLVGKDPVSDDDIRQNRIYKILELNHYDPAYVGSILVGWCQKKWGKRNTLWLFGHATTGKTNIAEAIAHAVPFYGCVNWTNENFPFNDCVEKMIIWWEEGKMTAKVVETAKAILGGSRVRVDQKCKASVPIEPTPVIITSNTNMCYVIDGNTTTFEHKQPLEDRMFKLELLTRLPDDFGKVTKQEVRQFFRWSQDHLTPVIPEFLVRKAESRKRPAPSGEGYISPTKRPALAEQQQASESADPVPTRYRIKCSKHCGMDKMLFPCQICESMNRDINICAIHKTTDCKECFPDYGDKDDVELPPCTEHNVSRCYQCHSGELYRVTSDSDEKPAPESDEGTEPSYAPCTIHHLMGKSHGLVTCAACRLKNSTLHDDLDDGDLEQ

SEQ ID NO: 547 - protein, 541 aa, Artificial Sequence
  Synthetic polypeptide
MRSYYEVIVQLPNDVESQVPGISDSFVNWITSREWTLPEDADWDLDQVDQVQLTLGDKIQREIRTHWGTMAKEPDFHYFIQLEQGEVFFHLHVLLETCSVKPMVLGRYIRHIQQKIVSKVYCATSLRWKDGCVVTKTKNFGGANKVRAESYIPAYLIPKQQPEVQWAWTNVPEYIKACLHRELRASLARLHFEEAGVSQSKENLARTADGAPVMPTRVSKRYMELVDWLVEKGITTEKEWLLENRESFRSFQASSNSARQIKTALQGAIQEMLLTKTAEDYLVGKDPVSDDDIRQNRIYKILELNHYDPAYVGSILVGWCQKKWGKRNTLWLFGHATTGKTNIAEAIAHAVPFYGCVNWTNENFPFNDCVEKMIIWWEEGKMTAKVVETAKAILGGSRVRVDQKCKASVPIEPTPVIITSNTNMCYVIDGNTTTFEHKQPLEDRMFKLELLTRLPDDFGKVTKQEVRQFFRWSQDHLTPVIPEFLVRKAESRKRPAPSGEGYISPTKRPALAEQQQASESADPVPTRLVGAVGQKGSECCS

SEQ ID NO: 548 - protein, 743 aa, Artificial Sequence
  Synthetic polypeptide
MSLISDAIPDWLERLVKKGVNAAADFYHLESGPPRPKANQQTQESLEKDDSRGLVFPGYNYLGPFNGLDKGEPVNEADAAALEHDKAYDLEIKDGHNPYFEYNEADRRFQERLKDDTSFGGNLGKAIFQAKKRVLEPFGLVEDSKTAPTGDKRKGEDEPRLPDTSSQTPKKNKKPRKERPSGGAEDPGEGTSSNAGAAAPASSVGSSIMAEGGGGPVGDAGQGADGVGNSSGNWHCDSQWLENGVVTRTTRTWVLPSYNNHLYKRIQGPSGGDNNNKFFGFSTPWGYFDYNRFHCHFSPRDWQRLINNNWGIRPKAMRFRLFNIQVKEVTVQDFNTTIGNNLTSTVQVFADKDYQLPYVLGSATEGTFPPFPADIYTIPQYGYCTLNYNNEAVDRSAFYCLDYFPSDMLRTGNNFEFTYTFEDVPFHSMFAHNQTLDRLMNPLVDQYLWAFSSVSQAGSSGRALHYSRATKTNMAAQYRNWLPGPFFRDQQIFTGASNITKNNVFSVWEKGKQWELDNRTNLMQPGPAAATTFSGEPDRQAMQNTLAFSRTVYDQTTATTDRNQILITNEDEIRPTNSVGIDAWGAVPTNNQSIVTPGTRAAVNNQGALPGMVWQNRDIYPTGTHLAKIPDTDNHFHPSPLIGRFGCKHPPPQIFIKNTPVPANPSETFQTAKVASFINQYSTGQCTVEIFWELKKETSKRWNPEIQFTSNFGNAADIQFAVSDTGSYSEPRPIGTRYLTKPL

SEQ ID NO: 549 - protein, 598 aa, Artificial Sequence
  Synthetic polypeptide
TAPTGDKRKGEDEPRLPDTSSQTPKKNKKPRKERPSGGAEDPGEGTSSNAGAAAPASSVGSSIMAEGGGGPVGDAGQGADGVGNSSGNWHCDSQWLENGVVTRTTRTWVLPSYNNHLYKRIQGPSGGDNNNKFFGFSTPWGYFDYNRFHCHFSPRDWQRLINNNWGIRPKAMRFRLFNIQVKEVTVQDFNTTIGNNLTSTVQVFADKDYQLPYVLGSATEGTFPPFPADIYTIPQYGYCTLNYNNEAVDRSAFYCLDYFPSDMLRTGNNFEFTYTFEDVPFHSMFAHNQTLDRLMNPLVDQYLWAFSSVSQAGSSGRALHYSRATKTNMAAQYRNWLPGPFFRDQQIFTGASNITKNNVFSVWEKGKQWELDNRTNLMQPGPAAATTFSGEPDRQAMQNTLAFSRTVYDQTTATTDRNQILITNEDEIRPTNSVGIDAWGAVPTNNQSIVTPGTRAAVNNQGALPGMVWQNRDIYPTGTHLAKIPDTDNHFHPSPLIGRFGCKHPPPQIFIKNTPVPANPSETFQTAKVASFINQYSTGQCTVEIFWELKKETSKRWNPEIQFTSNFGNAADIQFAVSDTGSYSEPRPIGTRYLTKPL

SEQ ID NO: 550 - DNA, 4694 bp, Artificial Sequence
  Synthetic polynucleotide
tggccagtttccaagacaggctcgctcgctcactcgggccggggccccaaaggggcccctagcgaccgcttcgcggtcgcggcccgagtgagcgagcgagcctgtcttggaaactggccagcactccggtgaggtaatgccgtcacgtggtcgggaatgggaacgggaaatctcgcgagaacgtaaacaaatataagacggcgccacacggcgctgcgtcatacgcgcgcgcgcaccggcgagatgaggtcgtactacgaggtcatcgttcagctgcccaacgacgtcgagagtcaggtacctggaatctccgattcgttcgtcaactggattacgtcgcgagaatggacgttgcctgaggacgccgattgggatttggaccaggtcgatcaagttcaactgacgctcggcgacaaaatccaacgggagattcgaactcattgggggacgatggccaaagaaccggactttcactattttatccaactggaacaaggtgaggtgttctttcatttacacgtcctgctggaaacgtgttccgtaaagccgatggtactcggaagatatatccgacatattcaacaaaaaattgtgagtaaagtctactgcgccacgagcctacgatggaaggatggatgcgtggtgaccaagaccaaaaatttcgggggcgcgaacaaggtccgggccgagtcgtatattcccgcctacctgatcccgaaacagcaaccggaagtgcagtgggcgtggactaacgtgcccgagtatataaaagcgtgcttgcaccgagaactgcgtgccagtctcgcgcgacttcacttcgaggaggcgggcgtctcgcaatccaaggaaaatctcgcgagaactgcagacggcgctcccgtgatgccgacccgcgtcagcaaacgctacatggagctcgtggattggctcgtggagaaggggatcaccaccgagaaggaatggctgctggaaaacagagaaagctttcggagctttcaggcctcgagcaactcggcgcgtcagatcaagacggccctgcaaggcgccattcaggagatgcttctgaccaagacggcggaggactacctcgtcggaaaggatcccgtctcggacgacgacatccgtcagaaccgcatctacaagattctggaactgaaccactacgacccagcgtacgtggggagtattttggtcgggtggtgccagaagaaatggggcaagcgaaacacgctgtggctgttcggacatgcgaccaccggcaagaccaacatcgcggaggctattgcccatgctgtgccgttctatggatgcgttaactggaccaacgagaactttccgttcaacgactgcgtcgaaaaaatgattatctggtgggaggagggcaaaatgaccgccaaagtggtggaaacagccaaggcgattctgggaggatctcgggtgagagtggaccaaaaatgcaaagcttcggttccgatcgaaccgacgccggtcattattaccagtaacaccaacatgtgttatgtcatcgacgggaacacgaccacgttcgagcataagcagccgttggaggacaggatgtttaagctcgaattgctgactcggttgcctgatgactttggtaaggtgaccaaacaggaggtgcgtcaattcttcaggtggtctcaggatcacctgacccctgtgatcccagaattcctagtgcggaaggcggagtctcgcaaaagacccgccccttccggggaaggctatataagcccgacaaagcggcccgcgctcgcagagcagcagcaggcgtcggagagcgcggacccggttcccaccaggtatcgtatcaaatgctcgaaacattgcggtatggataaaatgttgtttccttgccaaatttgtgaatcgatgaacagagatattaatatttgtgctattcataaaacgaccgactgtaaagagtgtttccccgactacggggataaagatgatgtagaactacccccctgtacagaacacaacgtgtctcgttgttatcaatgtcattcgggcgaattgtatcgcgtgacttcggactctgacgagaaacctgcccccgagagtgatgaaggcaccgagccatcctatgctccctgcacgattcaccacctgatgggcaagagtcacgggttagtcacttgcgcggcgtgtcggttgaaaaatagtacgttgcatgatgacttggatgacggtgatctcgaacaataaatgattgaaatgtagccatgtctctcatttctgatgcgattccagattggttggagcggttggtcaaaaagggagtgaatgctgcagctgatttctaccatttggaaagcggtcctcctcgtcctaaggcaaatcagcaaactcaagaatctcttgaaaaggacgattcgagaggtctcgtgttcccaggctacaattatctaggccctttcaacggtctagataaaggagaacccgtcaacgaggcagacgctgccgccttagaacacgacaaggcttacgacctcgaaatcaaggacgggcacaacccgtactttgagtacaacgaggccgacagacgtttccaggaacgtctcaaagacgatacctcctttggaggcaatttaggtaaagccatcttccaggccaaaaagagggttctcgaaccctttggtctggtggaagactcaaagacggctccgaccggagacaagcggaaaggcgaagacgaacctcgtttgcccgacacttcttcacagactcccaagaaaaacaagaagcctcgcaaggaaagaccttccggcggggcagaagatccgggcgaaggcacctcttccaacgctggagcagcagcacccgcctctagtgtgggatcatctatcatggctgaaggaggtggcggcccagtgggcgatgcaggccagggtgccgatggagtgggcaattcctccggaaattggcattgcgattcccaatggctggaaaacggagtcgtcactcgaaccacccgaacctgggtcttgcccagctacaacaaccacctgtacaaacgaatccaaggacccagcggaggcgacaacaacaacaaattctttggattcagcaccccctggggatactttgactacaatcgattccactgccacttttccccgcgagactggcaacgactcatcaacaacaactggggcatccgtcccaaagcgatgcgctttagactctttaacatccaggttaaagaggtcacggtccaagacttcaacaccaccatcggcaacaacctcaccagtacggtccaggtctttgcggacaaggactaccaactgccgtacgtcctcggatcggctaccgaaggcaccttcccgccgttcccagcggatatctacacgatcccgcagtacgggtactgcacgctaaactacaacaacgaggcggtggatcgttcggccttctactgtctggactactttccctcagacatgctgcggacaggaaataactttgagtttacttacaccttcgaggacgttcctttccatagcatgtttgcccacaaccagacgctagaccggctgatgaatcccctcgtggatcagtacctctgggctttcagctccgtcagccaagcaggctcatctggacgagctcttcattactcgcgggcgactaaaaccaacatggcggctcaatataggaactggttacctgggcctttcttccgtgatcagcaaatctttacgggcgctagcaacatcactaaaaataacgtctttagcgtttgggaaaaaggcaagcaatgggaactcgacaatcggaccaacctaatgcagcccggtcctgcggcagcgaccacctttagcggagaacctgaccgtcaagccatgcaaaacacgctggcttttagcaggaccgtctacgatcaaacgaccgccacgaccgatcgtaaccagatactcatcaccaacgaagacgaaatcagacccaccaactcggtcggtatcgacgcgtggggagcagttcccaccaacaaccagtcgatcgtgacccccggcactcgcgcggccgtcaacaatcaaggggcgcttcccgggatggtgtggcaaaacagagacatttaccctacagggacccatttggccaaaattcccgacactgacaatcacttccatccgtccccgcttattgggcggtttggctgcaagcatccccctccccagattttcattaaaaacacacccgtccctgccaacccttcggaaacgttccagacggccaaagtggcctccttcatcaaccagtactcgaccggacagtgcaccgtcgaaatcttttgggaactcaagaaggaaacctccaagcgctggaaccccgaaatccagttcacctccaactttggcaacgcggccgacatccagtttgccgtctccgacacgggatcctattccgaacctcgtcccatcggtacccgttaccttaccaaacctctgtaaattaaacccttcaataaaccgtttatgcgtaactgtatttccgtctcctgtcgttattcagtcacatgatgcggcattacctcaccggagtgctggccagtttccaagacaggctcgctcgctcactcgggccggggccccaaaggggcccctagcgaccgcttcgcggtcgcggcccgagtgagcgagcgagcctgtcttggaaactggcca

SEQ ID NO: 551 - DNA, 2211 bp, Artificial Sequence
  Synthetic polynucleotide
atggctgctgatggttatcttccagattggctcgaggacactctctctgaaggaataagacagtggtggaagctcaaacctggcccaccaccaccaaagcccgcagagcggcataaggacgacagcaggggtcttgtgcttcctgggtacaagtacctcggacccttcaacggactcgacaagggagagccggtcaacgaggcagacgcagcggccctcgagcacgacaaggcctacgaccagcagctcaaggccggtgacaacccctacctcaagtacaaccacgccgacgcggagttccagcagcggcttcagggcgacacatcgtttgggggcaacctcggcagagcagtcttccaggccaaaaagagggttcttgaacctcttggtctggttgagcaagcgggtgagacggctcctggaaagaagagaccgttgattgaatccccccagcagcccgactcctccacgggtatcggcaaaaaaggcaagcagccggctaaaaagagactcaattttggtcagactggcgactcagagtcagtccccgacccacaacctctcggagaacctccagcaacccccgctgctgtgggacctactacaatggcttcaggtggtggcgcaccaatggcagacaataacgaaggcgccgacggagtgggtaatgcctcaggaaattggcattgcgattccacatggctgggcgacagagtcatcaccaccagcacccgcacctgggccttgcccacctacaataaccacctctacaagcaaatctccagtgcttcaacgggggccagcaacgacaaccactacttcggctacagcaccccctgggggtattttgacttcaacagattccactgccacttttcaccacgtgactggcagcgactcatcaacaacaattggggattccggcccaagagactcaacttcaaactcttcaacatccaagtcaaggaggtcacgacgaatgatggcgtcacaaccatcgctaataaccttaccagcacggttcaagtcttctcggactcagactatcagctcccgtacgtgctcgggtcggctcacgagggctgcctcccgccgttcccagcagacgtcttcatggtgccacagtatggatacctcaccctgaacaacgggagtcaggcagtaggacgctcttcattttactgcctggagtactttccttctcagatgctgcgtaccggaaacaactttaccttcagctacacttttgaggacgttcctttccacagcagctacgctcacagccagagtctggaccgtctcatgaatcctctcatcgaccagtacctgtattacctgaacagaactcagaatcagtccggaagtgcccaaaacaaggacttgctgtttagccgggggtctccagctggcatgtctgttcagcccaaaaactggctacctggaccctgttatcggcagcagcgcgtttctaaaacaaaaacagacaacaacaacagcaactttacctggactggtgcttcaaaatataaccttaatgggcgtgaatctataatcaaccctggcactgctatggcctcacacaaagacgacaaagacaagttctttcccatgagcggtgtcatgatttttggaaaggagagcgccggagcttcaaacactgcattggacaatgtcatgatcacagacgaagaggaaatcaaagccactaaccccgtggccaccgaaagatttgggactgtggcagtcaatctccagagcagcagcacagaccctgcgaccggagatgtgcatgttatgggagccttacctggaatggtgtggcaagacagagacgtatacctgcagggtcccatttgggccaaaattcctcacacagatggacactttcacccgtctcctcttatgggcggctttggactcaagaacccgcctcctcagatcctcatcaaaaacacgcctgttcctgcgaatcctccggcggagttttcagctacaaagtttgcttcattcatcacccaatactccacaggacaagtgagtgtggaaattgaatgggagctgcagaaagaaaacagcaagcgctggaatcccgaagtgcagtacacatccaattatgcaaaatctgccaacgttgattttactgtggacaacaatggactttatactgagcctcgccccattggcacccgttacctcacccgtcccctgtaa

SEQ ID NO: 552 - protein, 736 aa, Artificial Sequence
  Synthetic polypeptide
MAADGYLPDWLEDTLSEGIRQWWKLKPGPPPPKPAERHKDDSRGLVLPGYKYLGPFNGLDKGEPVNEADAAALEHDKAYDQQLKAGDNPYLKYNHADAEFQQRLQGDTSFGGNLGRAVFQAKKRVLEPLGLVEQAGETAPGKKRPLIESPQQPDSSTGIGKKGKQPAKKRLNFGQTGDSESVPDPQPLGEPPATPAAVGPTTMASGGGAPMADNNEGADGVGNASGNWHCDSTWLGDRVITTSTRTWALPTYNNHLYKQISSASTGASNDNHYFGYSTPWGYFDFNRFHCHFSPRDWQRLINNNWGFRPKRLNFKLFNIQVKEVTTNDGVTTIANNLTSTVQVFSDSDYQLPYVLGSAHEGCLPPFPADVFMVPQYGYLTLNNGSQAVGRSSFYCLEYFPSQMLRTGNNFTFSYTFEDVPFHSSYAHSQSLDRLMNPLIDQYLYYLNRTQNQSGSAQNKDLLFSRGSPAGMSVQPKNWLPGPCYRQQRVSKTKTDNNNSNFTWTGASKYNLNGRESIINPGTAMASHKDDKDKFFPMSGVMIFGKESAGASNTALDNVMITDEEEIKATNPVATERFGTVAVNLQSSSTDPATGDVHVMGALPGMVWQDRDVYLQGPIWAKIPHTDGHFHPSPLMGGFGLKNPPPQILIKNTPVPANPPAEFSATKFASFITQYSTGQVSVEIEWELQKENSKRWNPEVQYTSNYAKSANVDFTVDNNGLYTEPRPIGTRYLTRPL

SEQ ID NO: 553 - DNA, 2211 bp, Artificial Sequence
  Synthetic polynucleotide
atggcttccgatggttatcttccagattggctcgaggacaacctctctgagggcatccgcgagtggtgggacttgaaacctggagccccgaaacccaaagccaaccagcaaaagcaggacgacggccggggtctggtgcttcctggctacaagtacctcggacccttcaacggactcgacaagggggagcccgtcaacgcggcggatgcagcggccctcgagcacgacaaggcctacgaccagcagctcagagcgggtgacaatccgtacctgcggtataaccacgccgacgccgagtttcaggagcgtctgcaagaagatacgtcttttgggggcaacctcgggcgagcagtcttccaggccaagaagagggttctcgaaccttttggtctggttgaggaaggtgctaagacggctcctggaaagaaacgtccggtagagcagtcgccacaagagccagactcctcctcgggcattggcaagacaggccagcagcccgctaaaaagagactcaattttggtcagactggcgactcagagtcagtccccgacccacaacctctcggagaacctccagcaacccccgctgctgtgggacctactacaatggcttcaggcggtggcgcaccaatggcagacaataacgaaggcgccgacggagtgggtaatgcctcaggaaattggcattgcgattccacatggctgggcgacagagtcatcaccaccagcacccgaacatgggccttgcccacctataacaaccacctctacaagcaaatctccagtgcttcaacgggggccagcaacgacaaccactacttcggctacagcaccccctgggggtattttgatttcaacagattccactgccatttctcaccacgtgactggcagcgactcatcaacaacaattggggattccggcccaagagactcaacttcaaactcttcaacatccaagtcaaggaggtcacgacgaatgatggcgtcacaaccatcgctaataaccttaccagcacggttcaagtcttctcggactcggagtaccagcttccgtacgtcctcggctctgcgcaccagggctgcctccctccgttcccggcggacgtgttcatgattccgcagtacggctacctaacgctcaacaatggcagccaggcagtgggacggtcatccttttactgcctggaatatttcccatcgcagatgctgagaacgggcaataactttaccttcagctacaccttcgaggacgtgcctttccacagcagctacgcgcacagccagagcctggaccggctgatgaatcctctcatcgaccagtacctgtattacctgaacagaactcagaatcagtccggaagtgcccaaaacaaggacttgctgtttagccgggggtctccagctggcatgtctgttcagcccaaaaactggctacctggaccctgttaccggcagcagcgcgtttctaaaacaaaaacagacaacaacaacagcaactttacctggactggtgcttcaaaatataaccttaatgggcgtgaatctataatcaaccctggcactgctatggcctcacacaaagacgacaaagacaagttctttcccatgagcggtgtcatgatttttggaaaggagagcgccggagcttcaaacactgcattggacaatgtcatgatcacagacgaagaggaaatcaaagccactaaccccgtggccaccgaaagatttgggactgtggcagtcaatctccagagcagcagcacagaccctgcgaccggagatgtgcatgttatgggagccttacctggaatggtgtggcaagacagagacgtatacctgcagggtcccatttgggccaaaattcctcacacagatggacactttcacccgtctcctcttatgggcggctttggacttaagcacccgcctcctcagatcctcatcaaaaacacgcctgttcctgcgaatcctccggcagagttttcggctacaaagtttgcttcattcatcacccagtattctactggccaagtcagcgtggagattgaatgggagctgcagaaagaaaacagcaaacgctggaatcccgaagtgcagtatacatctaactatgcaaaatctgccaacgttgatttcactgtggacaacaatggactttatactgagcctcgtcccattggcacccgttacctcacccgtcccctgtaa

SEQ ID NO: 554 - protein, 736 aa, Artificial Sequence
  Synthetic polypeptide
MASDGYLPDWLEDNLSEGIREWWDLKPGAPKPKANQQKQDDGRGLVLPGYKYLGPFNGLDKGEPVNAADAAALEHDKAYDQQLRAGDNPYLRYNHADAEFQERLQEDTSFGGNLGRAVFQAKKRVLEPFGLVEEGAKTAPGKKRPVEQSPQEPDSSSGIGKTGQQPAKKRLNFGQTGDSESVPDPQPLGEPPATPAAVGPTTMASGGGAPMADNNEGADGVGNASGNWHCDSTWLGDRVITTSTRTWALPTYNNHLYKQISSASTGASNDNHYFGYSTPWGYFDFNRFHCHFSPRDWQRLINNNWGFRPKRLNFKLFNIQVKEVTTNDGVTTIANNLTSTVQVFSDSEYQLPYVLGSAHQGCLPPFPADVFMIPQYGYLTLNNGSQAVGRSSFYCLEYFPSQMLRTGNNFTFSYTFEDVPFHSSYAHSQSLDRLMNPLIDQYLYYLNRTQNQSGSAQNKDLLFSRGSPAGMSVQPKNWLPGPCYRQQRVSKTKTDNNNSNFTWTGASKYNLNGRESIINPGTAMASHKDDKDKFFPMSGVMIFGKESAGASNTALDNVMITDEEEIKATNPVATERFGTVAVNLQSSSTDPATGDVHVMGALPGMVWQDRDVYLQGPIWAKIPHTDGHFHPSPLMGGFGLKHPPPQILIKNTPVPANPPAEFSATKFASFITQYSTGQVSVEIEWELQKENSKRWNPEVQYTSNYAKSANVDFTVDNNGLYTEPRPIGTRYLTRPL

SEQ ID NO: 555 - DNA, 2211 bp, Artificial Sequence
  Synthetic polynucleotide
atggctgctgatggttatcttccagattggctcgaggacactctctctgaaggaataagacagtggtggaagctcaaacctggcccaccaccaccaaagcccgcagagcggcataaggacgacagcaggggtcttgtgcttcctgggtacaagtacctcggacccttcaacggactcgacaagggagagccggtcaacgaggcagacgcagcggccctcgagcacgacaaggcctacgaccagcagctcaaggccggtgacaacccctacctcaagtacaaccacgccgacgcggagttccagcagcggcttcagggcgacacatcgtttgggggcaacctcggcagagcagtcttccaggccaaaaagagggttcttgaacctcttggtctggttgagcaagcgggtgagacggctcctggaaagaagagaccgttgattgaatccccccagcagcccgactcctccacgggtatcggcaaaaaaggcaagcagccggctaaaaagagactcaattttggtcagactggcgactcagagtcagtccccgacccacaacctctcggagaacctccagcaacccccgctgctgtgggacctactacaatggcttcaggtggtggcgcaccaatggcagacaataacgaaggcgccgacggagtgggtaatgcctcaggaaattggcattgcgattccacatggctgggcgacagagtcatcaccaccagcacccgcacctgggccttgcccacctacaataaccacctctacaagcaaatctccagtgcttcaacgggggccagcaacgacaaccactacttcggctacagcaccccctgggggtattttgacttcaacagattccactgccacttttcaccacgtgactggcagcgactcatcaacaacaattggggattccggcccaagagactcaacttcaaactcttcaacatccaagtcaaggaggtcacgacgaatgatggcgtcacaaccatcgctaataaccttaccagcacggttcaagtcttctcggactcagactatcagctcccgtacgtgctcgggtcggctcacgagggctgcctcccgccgttcccagcagacgtcttcatggtgccacagtatggatacctcaccctgaacaacgggagtcaggcagtaggacgctcttcattttactgcctggagtactttccttctcagatgctgcgtaccggaaacaactttaccttcagctacacttttgaggacgttcctttccacagcagctacgctcacagccagagtctggaccgtctcatgaatcctctcatcgaccagtacctgtattacctgaacagaactcagaatcagtccggaagtgcccaaaacaaggacttgctgtttagccgggggtctccaactggcatgtctgttcagcccaaaaactggctacctggaccctgttatcggcagcagcgcgtttctaaaacaaaaacagacaacaacaacagcaactttacctggactggtgcttcaaaatataaccttaatgggcgtgaatctataatcaaccctggcactgctatggcctcacacaaagacgacaaagacaagttctttcccatgagcggtgtcatgatttttggaaaggagagcgccggagcttcaaacactgcattggacaatgtcatgatcacagacgaagaggaaatcaaagccactaaccccgtggccactgaaagatttgggactgtggcagtcaatctccagagcagcagcacagaccctgcgaccggagatgtgcatgccatgggagccttacctggaatggtgtggcaagacagagacgtatacctgcagggtcctatttgggccaaaattcctcacacggatggacactttcacccgtctcctctcatgggcggctttggactcaagaacccgcctcctcagatcctcatcaaaaacacgcctgttcctgcgaatcctccggcggagttttcagctacaaagtttgcttcattcatcacccagtattccacaggacaagtgagcgtggagattgaatgggagctgcagaaagaaaacagcaaacgctggaatcccgaagtgcagtatacatctaactatgcaaaatctgccaacgttgatttcactgtggacaacaatggactttatactgagcctcgccccattggcacccgttacctcacccgtcccctgtaa

SEQ ID NO: 556 - protein, 736 aa, Artificial Sequence
  Synthetic polypeptide
MAADGYLPDWLEDTLSEGIRQWWKLKPGPPPPKPAERHKDDSRGLVLPGYKYLGPFNGLDKGEPVNEADAAALEHDKAYDQQLKAGDNPYLKYNHADAEFQQRLQGDTSFGGNLGRAVFQAKKRVLEPLGLVEQAGETAPGKKRPLIESPQQPDSSTGIGKKGKQPAKKRLNFGQTGDSESVPDPQPLGEPPATPAAVGPTTMASGGGAPMADNNEGADGVGNASGNWHCDSTWLGDRVITTSTRTWALPTYNNHLYKQISSASTGASNDNHYFGYSTPWGYFDFNRFHCHFSPRDWQRLINNNWGFRPKRLNFKLFNIQVKEVTTNDGVTTIANNLTSTVQVFSDSDYQLPYVLGSAHEGCLPPFPADVFMVPQYGYLTLNNGSQAVGRSSFYCLEYFPSQMLRTGNNFTFSYTFEDVPFHSSYAHSQSLDRLMNPLIDQYLYYLNRTQNQSGSAQNKDLLFSRGSPTGMSVQPKNWLPGPCYRQQRVSKTKTDNNNSNFTWTGASKYNLNGRESIINPGTAMASHKDDKDKFFPMSGVMIFGKESAGASNTALDNVMITDEEEIKATNPVATERFGTVAVNLQSSSTDPATGDVHAMGALPGMVWQDRDVYLQGPIWAKIPHTDGHFHPSPLMGGFGLKNPPPQILIKNTPVPANPPAEFSATKFASFITQYSTGQVSVEIEWELQKENSKRWNPEVQYTSNYAKSANVDFTVDNNGLYTEPRPIGTRYLTRPL

SEQ ID NO: 557 - DNA, 2211 bp, Artificial Sequence
  Synthetic polynucleotide
atggctgccgatggttatcttccagattggctcgaggacaacctctctgagggcattcgcgagtggtgggcgctgaaacctggagccccgaagcccaaagccaaccagcaaaagcaggacgacggccggggtctggtgcttcctggctacaagtacctcggacccttcaacggactcgacaagggggagcccgtcaacgcggcggatgcagcggccctcgagcacgacaaggcctacgaccagcagctcaaagcgggtgacaatccgtacctgcggtataaccacgccgacgccgagtttcaggagcgtctgcaagaagatacgtcttttgggggcaacctcgggcgagcagtcttccaggccaagaagcgggttctcgaacctctcggtctggttgaggaaggcgctaagacggctcctggaaagaaacgtccggtagagcaatcgccacaagagccagactcctcctcgggcatcggcaagacaggccagcagcccgctaaaaagagactcaattttggtcagactggcgactcagagtcagtccccgacccacaacctctcggagaacctccagcaacccccgctgctgtgggacctactacaatggcttcaggcggtggcgcaccaatggcagacaataacgaaggcgccgacggagtgggtaatgcctcaggaaattggcattgcgattccacatggctgggcgacagagtcatcaccaccagcacccgaacatgggccttgcccacctataacaaccacctctacaagcaaatctccagtgcttcgacgggggccagcaacgacaaccactacttcggctacagcaccccctgggggtattttgactttaacagattccactgccacttttcaccacgtgactggcagcgactcatcaacaacaactggggattccggcccaagagactcagcttcaagctcttcaacatccaggtcaaggaggtcacgacgaatgatggcgtcacaaccatcgctaataaccttaccagcacggttcaagtcttctcggactcggagtaccagcttccgtacgtcctcggctctgcgcaccagggctgcctccctccgttcccggcggacgtgttcatgattccgcaatacggctacctgacgctcaacaatggcagccaagccgtgggacgttcatccttttactgcctggaatatttcccttctcagatgctgagaacgggcaacaactttaccttcagctacacctttgaggaagtgcctttccacagcagctacgcgcacagccagagcctggaccggctgatgaatcctctcatcgatcaatacctgtattacctgaacagaactcaaaatcagtccggaagtgcccaaaacaaggacttgctgtttagccgtgggtctccagctggcatgtctgttcagcccaaaaactggctacctggaccctgttatcggcagcagcgcgtttctaaaacaaaaacagacaacaacaacagcaattttacctggactggtgcttcaaaatataacctcaatgggcgtgaatccatcatcaaccctggcactgctatggcctcacataaagacgacgaagacaagttctttcccatgagcggtgtcatgatttttggaaaagagagcgccggagcttcaaacactgcattggacaatgtcatgattacagacgaagaggaaattaaagccactaaccctgtggccaccgaaagatttgggaccgtggcagtcaatttccagagcagcagcacagaccctgcgaccggagatgtgcatgctatgggagcattacctggcatggtgtggcaagatagagacgtgtacctgcagggtcccatttgggccaaaattcctcacacagatggacactttcacccgtctcctcttatgggcggctttggactcaagaacccgcctcctcagatcctcatcaaaaacacgcctgttcctgcgaatcctccggcggagttttcagctacaaagtttgcttcattcatcacccaatactccacaggacaagtgagcgtggagattgaatgggagctgcagaaagaaaacagcaaacgctggaatcccgaagtgcagtatacatctaactatgcaaaatctgccaacattgatttcactgtggacaacaatggactttatactgagcctcgccccattggcacccgttacctcacccgtccccagtaa

SEQ ID NO: 558 - protein, 736 aa, Artificial Sequence
  Synthetic polypeptide
MAADGYLPDWLEDNLSEGIREWWALKPGAPKPKANQQKQDDGRGLVLPGYKYLGPFNGLDKGEPVNAADAAALEHDKAYDQQLKAGDNPYLRYNHADAEFQERLQEDTSFGGNLGRAVFQAKKRVLEPLGLVEEGAKTAPGKKRPVEQSPQEPDSSSGIGKTGQQPAKKRLNFGQTGDSESVPDPQPLGEPPATPAAVGPTTMASGGGAPMADNNEGADGVGNASGNWHCDSTWLGDRVITTSTRTWALPTYNNHLYKQISSASTGASNDNHYFGYSTPWGYFDFNRFHCHFSPRDWQRLINNNWGFRPKRLSFKLFNIQVKEVTTNDGVTTIANNLTSTVQVFSDSEYQLPYVLGSAHQGCLPPFPADVFMIPQYGYLTLNNGSQAVGRSSFYCLEYFPSQMLRTGNNFTFSYTFEEVPFHSSYAHSQSLDRLMNPLIDQYLYYLNRTQNQSGSAQNKDLLFSRGSPAGMSVQPKNWLPGPCYRQQRVSKTKTDNNNSNFTWTGASKYNLNGRESIINPGTAMASHKDDEDKFFPMSGVMIFGKESAGASNTALDNVMITDEEEIKATNPVATERFGTVAVNFQSSSTDPATGDVHAMGALPGMVWQDRDVYLQGPIWAKIPHTDGHFHPSPLMGGFGLKNPPPQILIKNTPVPANPPAEFSATKFASFITQYSTGQVSVEIEWELQKENSKRWNPEVQYTSNYAKSANIDFTVDNNGLYTEPRPIGTRYLTRPQ

SEQ ID NO: 559 - DNA, 2211 bp, Artificial Sequence
  Synthetic polynucleotide
atggctgccgatggttatcttccagattggctcgaggacaacctctctgagggcattcgcgagtggtgggacttgaaacctggagccccgaaacccaaagccaaccagcaaaagcaggacgacggccggggtctggtgcttcctggctacaagtacctcggacccttcaacggactcgacaagggggagcccgtcaacgcggcggatgcagcggccctcgagcacgacaaggcctacgaccagcagctcaaagcgggtgacaatccgtaccttcggtataaccacgccgacgccgagtttcaggagcgtctgcaagaagatacgtcttttgggggcaacctcgggcgagcagtcttccaggccaaaaagagggttctcgaacctctcggtctggttgaggaagcggctaagacggctcctggaaagaaacgtccggtagagcagtcgccacaagagccagactcctcctcgggcattggcaagacaggccagcagcccgctaaaaagagactcaattttggtcagactggcgactcagagtcagtccccgacccacaacctctcggagaacctcccgcagccccctcaggtgtgggatctcttacaatggcttcaggtggtggcgcaccaatggcagacaataacgaaggcgccgacggagtgggtaatgcctcaggaaattggcattgcgattccacatggctgggcgacagagtcatcaccaccagcacccgcacctgggccttgcccacctacaataaccacctctacaagcaaatctccagtgcttcaacgggggccagcaacgacaaccactacttcggctacagcaccccctgggggtattttgacttcaacagattccactgccacttttcaccacgtgactggcaaagactcatcaacaacaattggggattccggcccaagagactcaacttcaagctcttcaacatccaagtcaaggaggtcacgacgaatgatggcgtcacgaccatcgctaataaccttaccagcacggttcaagtcttctcggactcggagtaccagttgccgtacgtcctcggctctgcgcaccagggctgcctccctccgttcccggcggacgtgttcatgattccgcagtacggctacctaacgctcaacaatggcagccaggcagtgggacggtcatccttttactgcctggaatatttcccatcgcagatgctgagaacgggcaacaactttaccttcagctacacctttgaggaagtgcctttccacagcagctacgcgcacagccagagcctggaccggctgatgaatcctctcatcgaccagtacctgtattacctgaacagaactcaaaatcagtccggaagtgcccaaaacaaggacttgctgtttagccgtgggtctccagctggcatgtctgttcagcccaaaaactggctacctggaccctgttaccggcagcagtgcgtttctaaaacaaaaacagacaacaacaacagcaactttacctggactggtgcttcaaaatataaccttaatgggcgtgaatctataatcaaccctggcactgctatggcctcacacaaagacgacaaagacaagttctttcccatgagcggtgtcatgatttttggaaaggagagcgccggagcttcaaacactgcattggacaatgtcatgatcacagacgaagaggaaatcaaagccactaaccccgtggccaccgaaagatttgggactgtggcagtcaatctccagagcagcagcacagaccctgcgaccggagatgtgcatgttatgggagccttacctggaatggtgtggcaagacagagacgtatacctgcagggtcctatttgggccaaaattcctcacacagatggacactttcacccgtctcctcttatgggcggctttggactcaagaacccgcctcctcagatcctcatcaaaaacacgcctgttcctgcgaatcctccggcggagttttcagctacaaagtttgcttcattcatcacccaatactccacaggacaagtgagcgtggagattgaatgggagctgcagaaagaaaacagcaagcgctggaatcccgaagtgcagtacacatccaattatgcaaaatctgccaacgttgatttcactgtggacaacaatggactttatactgagcctcgccccattggcacccgttacctcacccgtcccctgtaa

SEQ ID NO: 560 - protein, 736 aa, Artificial Sequence
  Synthetic polypeptide
MAADGYLPDWLEDNLSEGIREWWDLKPGAPKPKANQQKQDDGRGLVLPGYKYLGPFNGLDKGEPVNAADAAALEHDKAYDQQLKAGDNPYLRYNHADAEFQERLQEDTSFGGNLGRAVFQAKKRVLEPLGLVEEAAKTAPGKKRPVEQSPQEPDSSSGIGKTGQQPAKKRLNFGQTGDSESVPDPQPLGEPPAAPSGVGSLTMASGGGAPMADNNEGADGVGNASGNWHCDSTWLGDRVITTSTRTWALPTYNNHLYKQISSASTGASNDNHYFGYSTPWGYFDFNRFHCHFSPRDWQRLINNNWGFRPKRLNFKLFNIQVKEVTTNDGVTTIANNLTSTVQVFSDSEYQLPYVLGSAHQGCLPPFPADVFMIPQYGYLTLNNGSQAVGRSSFYCLEYFPSQMLRTGNNFTFSYTFEEVPFHSSYAHSQSLDRLMNPLIDQYLYYLNRTQNQSGSAQNKDLLFSRGSPAGMSVQPKNWLPGPCYRQQCVSKTKTDNNNSNFTWTGASKYNLNGRESIINPGTAMASHKDDKDKFFPMSGVMIFGKESAGASNTALDNVMITDEEEIKATNPVATERFGTVAVNLQSSSTDPATGDVHVMGALPGMVWQDRDVYLQGPIWAKIPHTDGHFHPSPLMGGFGLKNPPPQILIKNTPVPANPPAEFSATKFASFITQYSTGQVSVEIEWELQKENSKRWNPEVQYTSNYAKSANVDFTVDNNGLYTEPRPIGTRYLTRPL

SEQ ID NO: 561 - DNA, 2211 bp, Artificial Sequence
  Synthetic polynucleotide
atggctgccgatggttatcttccagattggctcgaggacaacctctctgagggcattcgcgaatggtgggacttgaaacctggagccccgaaacccaaagtcaaccagcaaaagcaggacaacgctcggggtcttgtgcttccgggttacaaatacctcggacccttcaacggactcgacaagggggagcccgtcaacgcggcggacgcagcggccctcgagcacgacaaggcctacgaccagcagctcaaagcgggtgacaatccgtaccttcggtataaccacgccgacgccgagtttcaggagcgtctgcaagaagatacgtcttttgggggcaaccttggacgagcagtcttccaggccaagaagagggttctcgaaccttttggtctggttgaggaaggtgctaagacggctcctggaaagaaacgtccggtagagcagtcgccacaagagccagactcctcctcgggcattggcaagacaggccagcagcccgctaaaaagagactcaattttggtcagactggcgactcagagtcagtccccgacccacaacctctcggagaacctccagcaacccccgctgctgtgggacctactacaatggcttcaggcggtggcgcaccaatggcagacaataacgaaggcgccgacggagtgggtaatgcctcaggaaattggcattgcgattccacatggctgggcgacagagtcatcaccaccagcacccgcacctgggccttgcccacctacaataaccacctctacaagcaaatctccagtgcttcaacgggggccagcaacgacaaccactacttcggctacagcaccccctgggggtattttgacttcaacagattccactgccacttttcaccacgtgactggcaaagactcatcaacaacaattggggattccggcccaagagactcaacttcaagctcttcaacatccaagtcaaggaggtcacgacgaatgatggcgtcacgaccatcgctaataaccttaccagcacggttcaagtcttctcggactcggagtaccagttgccgtacgtcctcggctctgcgcaccagggctgcctccctccgttcccggcggacgtgttcatgattccgcaatacggctacctgacgctcaacaatggcagccaggcagtgggacggtcatccttttactgcctggaatatttcccatcgcagatgctgagaacgggcaataactttaccttcagctacacttttgaggacgttcctttccacagcagctacgctcacagccagagcctggaccggctgatgaatcctctcatcgaccagtacctgtattacctgaacagaactcagaatcagtccggaagtgcccaaaacaaggacttgctgtttagccgtgggtctccaactggcatgtctgttcagcccaaaaactggctacctggaccctgttatcggcagcagcgcgtttctaaaacaaaaacagacaacaacaacagcaactttacctggactggtgcttcaaaatataaccttaatgggcgtgaatctataatcaaccctggcactgctatggcctcacacaaagacgacgaagacaagttctttcccatgagcggtgtcatgatttttggaaaggagagcgccggagcttcaaacactgcattggacaatgtcatgatcacagacgaagaggaaatcaaagccactaaccccgtggccactgaaagatttgggactgtggcagtcaatctccagagcagcagcacagaccctgcgaccggagatgtgcatgccatgggagccttacctggaatggtgtggcaagacagagacgtatacctgcagggtcctatttgggccaaaattcctcacacggatggacactttcacccgtctcctctcatgggcggctttggacttaagcacccgcctcctcagatcctcatcaaaaacacgcctgttcctgcgaatcctccggcagagttttcggctacaaagtttgcttcattcatcacccagtattccacaggacaagtgagcgtggagattgaatgggagctgcagaaagaaaacagcaaacgctggaatcccgaagtgcagtatacatctaactatgcaaaatctgccaacgttgatttcactgtggacaacaatggactttatactgagcctcgccccattggcacccgttacctcacccgtcccctgtaa

SEQ ID NO: 562 - protein, 736 aa, Artificial Sequence
  Synthetic polypeptide
MAADGYLPDWLEDNLSEGIREWWDLKPGAPKPKVNQQKQDNARGLVLPGYKYLGPFNGLDKGEPVNAADAAALEHDKAYDQQLKAGDNPYLRYNHADAEFQERLQEDTSFGGNLGRAVFQAKKRVLEPFGLVEEGAKTAPGKKRPVEQSPQEPDSSSGIGKTGQQPAKKRLNFGQTGDSESVPDPQPLGEPPATPAAVGPTTMASGGGAPMADNNEGADGVGNASGNWHCDSTWLGDRVITTSTRTWALPTYNNHLYKQISSASTGASNDNHYFGYSTPWGYFDFNRFHCHFSPRDWQRLINNNWGFRPKRLNFKLFNIQVKEVTTNDGVTTIANNLTSTVQVFSDSEYQLPYVLGSAHQGCLPPFPADVFMIPQYGYLTLNNGSQAVGRSSFYCLEYFPSQMLRTGNNFTFSYTFEDVPFHSSYAHSQSLDRLMNPLIDQYLYYLNRTQNQSGSAQNKDLLFSRGSPTGMSVQPKNWLPGPCYRQQRVSKTKTDNNNSNFTWTGASKYNLNGRESIINPGTAMASHKDDEDKFFPMSGVMIFGKESAGASNTALDNVMITDEEEIKATNPVATERFGTVAVNLQSSSTDPATGDVHAMGALPGMVWQDRDVYLQGPIWAKIPHTDGHFHPSPLMGGFGLKHPPPQILIKNTPVPANPPAEFSATKFASFITQYSTGQVSVEIEWELQKENSKRWNPEVQYTSNYAKSANVDFTVDNNGLYTEPRPIGTRYLTRPL

SEQ ID NO: 563 - DNA, 2208 bp, Artificial Sequence
  Synthetic polynucleotide
  modified_base (955)..(955): a, c, t, or g
  misc_feature (955)..(955): n is a, c, g, or t
  modified_base (971)..(972): a, c, t, or g
  misc_feature (971)..(972): n is a, c, g, or t
  modified_base (981)..(981): a, c, t, or g
  misc_feature (981)..(981): n is a, c, g, or t
  modified_base (986)..(986): a, c, t, or g
  misc_feature (986)..(986): n is a, c, g, or t
  modified_base (1235)..(1235): a, c, t, or g
  misc_feature (1235)..(1235): n is a, c, g, or t
  modified_base (1694)..(1696): a, c, t, or g
  misc_feature (1694)..(1696): n is a, c, g, or t
  modified_base (1698)..(1698): a, c, t, or g
  misc_feature (1698)..(1698): n is a, c, g, or t
  modified_base (1763)..(1765): a, c, t, or g
  misc_feature (1763)..(1765): n is a, c, g, or t
  modified_base (1778)..(1778): a, c, t, or g
  misc_feature (1778)..(1778): n is a, c, g, or t
  modified_base (2204)..(2204): a, c, t, or g
  misc_feature (2204)..(2204): n is a, c, g, or t
atggctgccgatggttatcttccagattggctcgaggacaacctctctgagggcattcgcgaatggtgggacttgaaacctggagccccgaaacccaaagtcaaccagcaaaagcaggacaacgctcggggtcttgtgcttccgggttacaaatacctcggacccttcaacggactcgacaagggggagcccgtcaacgcggcggacgcagcggccctcgagcacgacaaggcctacgaccagcagctcaaagcgggtgacaatccgtaccttcggtataaccacgccgacgccgagtttcaggagcgtctgcaagaagatacgtcttttgggggcaaccttggacgagcagtcttccaggccaagaagagggttctcgaaccttttggtctggttgaggaaggtgctaagacggctcctggaaagaaacgtccggtagagcagtcgccacaagagccagactcctcctcgggcattggcaagacaggccagcagcccgctaaaaagagactcaattttggtcagactggcgactcagagtcagtccccgacccacaacctctcggagaacctccagcaacccccgctgctgtgggacctactacaatggcttcaggcggtggcgcaccaatggcagacaataacgaaggcgccgacggagtgggtaatgcctcaggaaattggcattgcgattccacatggctgggcgacagagtcatcaccaccagcacccgaacatgggccttgcccacctataacaaccacctctacaagcaaatctccagtgcttcaacgggggccagcaacgacaaccactacttcggctacagcaccccctgggggtattttgatttcaacagattccactgccacttttcaccacgtgactggcagcgactcatcaataacaattggggattccggcccaagagactcaacttcaaactcttcaacntccaagtcaaggaggnnacgacgaangatgncgtcacaaccatcgctaataaccttaccagcacggttcaagtcttctcggactcggagtaccagcttccgtacgtcctcggctctgcgcaccagggctgcctccctccgttcccggcggacgtgttcatgattccgcaatacggctacctgacgctcaacaatggcagccaggcagtgggacggtcatccttttactgcctggaatatttcccatcgcagatgctgagaacgggcaataactttacctncagctacacttttgaggacgttcctttccacagcagctacgctcacagccagagcctggaccggctgatgaatcctctcatcgaccagtacctgtattacctgaacagaactcagaatcagtccggaagtgcccaaaacaaggacttgctgtttagccgtgggtctccaactggcatgtctgttcagcccaaaaactggctacctggaccctgttatcggcagcagcgcgtttctaaaacaaaaacagacaacaacaacagcaactttacctggactggtgcttcaaaatataaccttaatgggcgtgaatctataatcaaccctggcactgctatggcctcacacaaagacgacgaagacaagttctttcccatgagcggtgtcatgatttttggaaaggagagcgccggagcttcaaacactgcattggacaatgtcatgatcacagacgaagagannncnaagccactaaccccgtggccactgaaagatttgggactgtggcagtcaatctccaagcagcacannnaccctgcgaccgnagatgtgcatgccatgggagccttacctggaatggtgtggcaagacagagacgtatacctgcagggtcctatttgggccaaaattcctcacacggatggacactttcacccgtctcctctcatgggcggctttggacttaagcacccgcctcctcagatcctcatcaaaaacacgcctgttcctgcgaatcctccggcagagttttcggctacaaagtttgcttcattcatcacccagtattccacaggacaagtgagcgtggagattgaatgggagctgcagaaagaaaacagcaaacgctggaatcccgaagtgcagtatacatctaactatgcaaaatctgccaacgttgatttcactgtggacaacaatggactttatactgagcctcgccccattggcacccgttacctcacccgtccccngtaa

SEQ ID NO: 564 - protein, 723 aa, Artificial Sequence
  Synthetic polypeptide
MAADGYLPDWLEDNLSEGIREWWDLKPGAPKPKVNQQKQDNARGLVLPGYKYLGPFNGLDKGEPVNAADAAALEHDKAYDQQLKAGDNPYLRYNHADAEFQERLQEDTSFGGNLGRAVFQAKKRVLEPFGLVEEGAKTAPGKKRPVEQSPQEPDSSSGIGKTGQQPAKKRLNFGQTGDSESVPDPQPLGEPPATPAAVGPTTMASGGGAPMADNNEGADGVGNASGNWHCDSTWLGDRVITTSTRTWALPTYNNHLYKQISSASTGASNDNHYFGYSTPWGYFDFNRFHCHFSPRDWQRLINNNWGFRPKRLNFKLFNQVKETTDVTTIANNLTSTVQVFSDSEYQLPYVLGSAHQGCLPPFPADVFMIPQYGYLTLNNGSQAVGRSSFYCLEYFPSQMLRTGNNFTSYTFEDVPFHSSYAHSQSLDRLMNPLIDQYLYYLNRTQNQSGSAQNKDLLFSRGSPTGMSVQPKNWLPGPCYRQQRVSKTKTDNNNSNFTWTGASKYNLNGRESIINPGTAMASHKDDEDKFFPMSGVMIFGKESAGASNTALDNVMITDEEATNPVATERFGTVAVNLQSSPATDVHAMGALPGMVWQDRDVYLQGPIWAKIPHTDGHFHPSPLMGGFGLKHPPPQILIKNTPVPANPPAEFSATKFASFITQYSTGQVSVEIEWELQKENSKRWNPEVQYTSNYAKSANVDFTVDNNGLYTEPRPIGTRYLTRP

SEQ ID NO: 565 - DNA, 2208 bp, Artificial Sequence
  Synthetic polynucleotide
atggctgccgatggttatcttccagattggctcgaggacactctctctgaaggaataagacagtggtggaagctcaaacctggcccaccaccaccaaagcccgcagagcggcataaggacgacagcaggggtcttgtgcttcctgggtacaagtacctcggacccttcaacggactcgacaagggagagccggtcaacgaggcagacgccgcggccctcgagcacgacaaagcctatgaccggcagctcgacagcggagacaacccgtacctcaagtacaaccacgccgacgcggagtttcaggagcgccttaaagaagatacgtcttttgggggcaacctcggacgagcagtcttccaggcgaaaaagagggttcttgaacctctgggcctggttgaggaacctgttaagacggctccgggaaaaaagaggccggtagagcactctcctgtggagccagactcctcctcgggaaccggaaaggcgggtcagcagcctgcaagaaaaagattgaattttggtcagactggagacgcagactcagtacctgacccccagcctctcggacagccaccagcagccccctctggtctgggaactaatacgatggctacaggcagtggcgcaccaatggcagacaataacgagggcgccgacggagtgggtaattcctcgggaaattggcattgcgattccacatggatgggcgacagagtcatcaccaccagcacccgaacctgggccctgcccacctacaacaaccacctctacaaacaaatttccagccaatcaggagcctcgaacgacaatcactactttggctacagcaccccttgggggtattttgacttcaacagattccactgccacttttcaccacgtgactggcaaagactcatcaacaacaactggggattccgacccaagagactcaagttcaagctctttaacattcaagtcaaagaggtcacgcagaatgacggtacgacgacgattgccaataaccttaccagcacggttcaggtgtttactgactcggagtaccagctcccgtacgtcctcggctcggcgcatcaaggatgcctcccgccgttcccagcagacgtcttcatggtgccacagtatggatacctcaccctgaacaacgggagtcaggcagtaggacgctcttcattttactgcctggagtactttccttctcagatgctgcgtaccggtaacaactttaccttcagctacacttttgaggacgttcctttccacagcagctacgctcacagccagagtctggaccgtctcatgaatcctctcatcgaccagtacctgtattacttgagcagaacagacgctccaagtggaaccaccacgcagtcaaggcttcagttttctcaggccggagcgagtgacattcgggaccagtctaggaactggcttcctggaccctgttaccgccagcagcgagtatcaaagacatctgcggataacaacaacagtgaatactcgtggactggagctaccaagtaccacctcaatggcagagactctctggtgaatccgggcccggccatggcaagccacaaggacgatgaagaaaagttttttcctcagagcggggttctcatctttgggaagcaaggctcagagaaaacaagtgtggacattgaaaaggtcatgattacagacgaagaggaaatcaggacaaccaatcccgtggctacggagcagtatggttctgtatctaccaacctccagagaggcaacagacaagcagctaccgcagatgtcaacacacaaggcgttcttccaggcatggtctggcaggacagagatgtgtaccttcaggggcccatctgggcaaagattccacacacggacggacattttcacccctctcccctcatgggtggattcggacttaaacaccctcctccacagattctcatcaagaacaccccggtacctgcgaatccttcgaccaccttcagtgcggcaaagtttgcttccttcatcacacagtactccacgggacaggtcagcgtggagatcgagtgggagctgcagaaggaaaacagcaaacgctggaatcccgaagttcagtacacttccaactacaacaagtctgttaatgtggactttactgtggacactaatggcgtgtattcagagcctcgccccattggcaccagatacctgactcgtaatctgtaa

SEQ ID NO: 566 - protein, 735 aa, Artificial Sequence
  Synthetic polypeptide
MAADGYLPDWLEDTLSEGIRQWWKLKPGPPPPKPAERHKDDSRGLVLPGYKYLGPFNGLDKGEPVNEADAAALEHDKAYDRQLDSGDNPYLKYNHADAEFQERLKEDTSFGGNLGRAVFQAKKRVLEPLGLVEEPVKTAPGKKRPVEHSPVEPDSSSGTGKAGQQPARKRLNFGQTGDADSVPDPQPLGQPPAAPSGLGTNTMATGSGAPMADNNEGADGVGNSSGNWHCDSTWMGDRVITTSTRTWALPTYNNHLYKQISSQSGASNDNHYFGYSTPWGYFDFNRFHCHFSPRDWQRLINNNWGFRPKRLKFKLFNIQVKEVTQNDGTTTIANNLTSTVQVFTDSEYQLPYVLGSAHQGCLPPFPADVFMVPQYGYLTLNNGSQAVGRSSFYCLEYFPSQMLRTGNNFTFSYTFEDVPFHSSYAHSQSLDRLMNPLIDQYLYYLSRTDAPSGTTTQSRLQFSQAGASDIRDQSRNWLPGPCYRQQRVSKTSADNNNSEYSWTGATKYHLNGRDSLVNPGPAMASHKDDEEKFFPQSGVLIFGKQGSEKTSVDIEKVMITDEEEIRTTNPVATEQYGSVSTNLQRGNRQAATADVNTQGVLPGMVWQDRDVYLQGPIWAKIPHTDGHFHPSPLMGGFGLKHPPPQILIKNTPVPANPSTTFSAAKFASFITQYSTGQVSVEIEWELQKENSKRWNPEVQYTSNYNKSVNVDFTVDTNGVYSEPRPIGTRYLTRNL

SEQ ID NO: 567 - DNA, 2208 bp, Artificial Sequence
  Synthetic polynucleotide
atggctgccgatggttatcttccagattggctcgaggacactctctctgaaggaataagacagtggtggaagctcaaacctggcccaccaccaccaaagcccgcagagcggcataaggacgacagcaggggtcttgtgcttcctgggtacaagtacctcggacccttcaacggactcgacaagggagagccggtcaacgaggcagacgccgcggccctcgagcacgacaaagcctatgaccggcagctcgacagcggagacaacccgtacctcaagtacaaccacgccgacgcggagtttcaggagcgccttaaagaagatacgtcttttgggggcaacctcggacgagcagtcttccaggcgaaaaagagggttcttgaacctctgggcctggttgaggaacctgttaagacggctccgggaaaaaagaggccggtagagcactctcctgtggagccagactcctcctcgggaaccggaaaggcgggccagcagcctgcaagaaaaagattgaattttggtcagactggagacgcaaactcagtacctgacccccagcctctcggacagccaccagcagccccctctggtctgggaactaatacgatggctacaggcagtggcgcaccaatggcagacaataacgagggcgccgacggagtgggtaattcctcgggaaattggcattgcgattccacatggatgggcgacagagtcatcaccaccagcacccgaacctgggccctgcccacctacaacaaccacctctacaaacaaatttccagccaatcaggagcctcgaacgacaatcactactttggctacagcaccccttgggggtattttgacttcaacagattccactgccacttttcaccacgtgactggcaaagactcatcaacaacaactggggattccgacccaagagactcaagttcaagctctttaacattcaagtcaaagaggtcacgcagaatgacggtacgacgacgattgccaataaccttaccagcacggttcaggtgtttactgactcggagtaccagctcccgtacgtcctcggctcggcgcatcaaggatgcctcccgccgttcccagcagacgtcttcatggtgccacagtatggatacctcaccctgaacaacgggagtcgggcagtaggacgctcttcattttactgcctggagtactttccttctcagatgctgcgtaccggtaacaactttaccttcagctacacttttgaggacgttcctttccacagcagctacgctcacagccagagtctggaccgtctcatgaatcctctcatcgaccagtacctgtattacttgagcagaacagacactccaagtggaaccaccacgcagtcaaggcttcagttttctcaggccggagcgagtgacattcgggaccagtctaggaactggcttcctggaccctgttaccgccagcagcgagtatcaaagacatctgcggataacaacaacagtgaatactcgtggactggagctaccaagtaccacctcaatggcagagactctctggtgaatccgggcccggccatggcaagccacaaggacgatgaagaaaagttttttcctcagagcggggttctcatctttgggaagcaaggctcagagaaaacaagtgtggacattgaaaaggtcatgattacagacgaagaggaaatcaggacgaccaatcccgtggctacggagcagtatggttctgtatctaccaacctccagagaggcaacagacaagcagctaccgcagatgtcaacacacaaggcgttcttccaggcatggtctggcaggacagagatgtgtaccttcaggggcccatctgggcaaagattccacacacggacggacattttcacccctctcccctcatgggtggattcggacttaaacaccctcctccacagattctcatcaagaacaccccggtacctgcgaatccttcgaccaccttcagtgcggcaaagtttgcttccttcatcacacagtactccacgggacaggtcagcgtggagatcgagtgggagctgcagaaggaaaacagcaaacgctggaatcccgaagttcagtacacttccaactacaacaagtctgttaatgtggactttactgtggacactaatggcgtgtatacagagcctcgccccattggcaccagatacctgactcgtaatctgtaa

SEQ ID NO: 568 - protein, 735 aa, Artificial Sequence
  Synthetic polypeptide
MAADGYLPDWLEDTLSEGIRQWWKLKPGPPPPKPAERHKDDSRGLVLPGYKYLGPFNGLDKGEPVNEADAAALEHDKAYDRQLDSGDNPYLKYNHADAEFQERLKEDTSFGGNLGRAVFQAKKRVLEPLGLVEEPVKTAPGKKRPVEHSPVEPDSSSGTGKAGQQPARKRLNFGQTGDANSVPDPQPLGQPPAAPSGLGTNTMATGSGAPMADNNEGADGVGNSSGNWHCDSTWMGDRVITTSTRTWALPTYNNHLYKQISSQSGASNDNHYFGYSTPWGYFDFNRFHCHFSPRDWQRLINNNWGFRPKRLKFKLFNIQVKEVTQNDGTTTIANNLTSTVQVFTDSEYQLPYVLGSAHQGCLPPFPADVFMVPQYGYLTLNNGSRAVGRSSFYCLEYFPSQMLRTGNNFTFSYTFEDVPFHSSYAHSQSLDRLMNPLIDQYLYYLSRTDTPSGTTTQSRLQFSQAGASDIRDQSRNWLPGPCYRQQRVSKTSADNNNSEYSWTGATKYHLNGRDSLVNPGPAMASHKDDEEKFFPQSGVLIFGKQGSEKTSVDIEKVMITDEEEIRTTNPVATEQYGSVSTNLQRGNRQAATADVNTQGVLPGMVWQDRDVYLQGPIWAKIPHTDGHFHPSPLMGGFGLKHPPPQILIKNTPVPANPSTTFSAAKFASFITQYSTGQVSVEIEWELQKENSKRWNPEVQYTSNYNKSVNVDFTVDTNGVYTEPRPIGTRYLTRNL

SEQ ID NO: 569 - DNA, 2211 bp, Artificial Sequence
  Synthetic polynucleotide
atggctgccgatggttatcttccagattggctcgaggacactctctctgaaggaataagacagtggtggaagctcaaacctggcccaccaccaccaaagcccgcagagcggcataaggacgacagcaggggtcttgtgcttcctgggtacaagtacctcggacccttcaacggactcgacaagggagagccggtcaacgaggcagacgccgcggccctcgagcacgacaaggcctacgaccagcagctcaaagcgggtgacaatccgtacctgcggtataaccacgccgacgccgagtttcaggagcgtctgcaagaagatacgtcttttgggggcaacctcgggcgagcagtcttccaggccaagaagcgggttctcgaacctctcggtctggttgaggaaggcgctaagacggctcctggaaagaaacgtccggtagagcagtcgccacaagagccagactcctcctcgggcatcggcaagacaggccagcagcccgctaaaaagagactcaattttggtcagactggcgactcagagtcagtccccgacccacaacctctcggagaacctccagcaacccccgctgctgtgggacctactacaatggcttcaggcggtggcgcaccaatggcagacaataacgaaggcgccgacggagtgggtaatgcctcaggaaattggcattgcgattccacatggctgggcgacagagtcatcaccaccagcacccgaacatgggccttgcccacctataacaaccacctctacaagcaaatctccagtgcttcgacgggggccagcaacgacaaccactacttcggctacagcaccccctgggggtattttgactttaacagattccactgccacttttcaccacgtgactggcagcgactcatcaacaataactggggattccggcccaagagactcagcttcaagctcttcaacatccaggtcaaggaggtcacgacgaatgatggcgtcacaaccatcgctaataaccttaccagcacggttcaagtcttctcggactcggagtaccagcttccgtacgtcctcggctctgcgcaccagggctgcctccctccgttcccggcggacgtgttcatgattccgcaatacggctacctgacgctcaacaatggcagccaagccgtgggacgttcatccttttactgcctggaatatttcccttctcagatgctgagaacgggcaacaactttaccttcagctacacctttgaggaagtgcctttccacagcagctacgcgcacagccagagcctggaccggctgatgaatcctctcatcgatcaatacctgtattacctgaacagaactcaaaatcagtccggaagtgcccaaaacaaggacttgctgtttagccgtgggtctccagctggcatgtctgttcagcccaaaaactggctacctggaccctgttatcggcagcagcgcgtttctaaaacaaaaacagacaacaacaacagcaattttacctggactggtgcttcaaaatataacctcaatgggcgtgaatccatcatcaaccctggcactgctatggcctcacacaaagacgacgaagacaagttctttcccatgagcggtgtcatgatttttggaaaagagagcgccggagcttcaaacactgcattggacaatgtcatgattacggacgaagaggaaattaaagccactaaccctgtggccaccgaaagatttgggaccgtggcagtcaatttccagagcagcagcacagaccctgcgaccggagatgtgcatgctatgggagcattacctggcatggtgtggcaagatagagacgtgtacctgcagggtcccatttgggccaaaattcctcacacagatggacactttcacccgtctcctcttatgggcggctttggactcaagaacccgcctcctcagatcctcatcaaaaacacgcctgttcctgcgaatcctccggcggagttttcagctacaaagtttgcttcattcatcactcaatactccacaggacaagtgagcgtggaaattgaatgggagctgcagaaagaaaacagcaaacgctggaatcccgaagtgcagtatacatctaactatgcaaaatctgccaacgttgatttcactgtggacaacaatggactttatactgagcctcgccccattggcacccgttacctcacccgtcccctgtaa

SEQ ID NO: 570 - protein, 736 aa, Artificial Sequence
  Synthetic polypeptide
MAADGYLPDWLEDTLSEGIRQWWKLKPGPPPPKPAERHKDDSRGLVLPGYKYLGPFNGLDKGEPVNEADAAALEHDKAYDQQLKAGDNPYLRYNHADAEFQERLQEDTSFGGNLGRAVFQAKKRVLEPLGLVEEGAKTAPGKKRPVEQSPQEPDSSSGIGKTGQQPAKKRLNFGQTGDSESVPDPQPLGEPPATPAAVGPTTMASGGGAPMADNNEGADGVGNASGNWHCDSTWLGDRVITTSTRTWALPTYNNHLYKQISSASTGASNDNHYFGYSTPWGYFDFNRFHCHFSPRDWQRLINNNWGFRPKRLSFKLFNIQVKEVTTNDGVTTIANNLTSTVQVFSDSEYQLPYVLGSAHQGCLPPFPADVFMIPQYGYLTLNNGSQAVGRSSFYCLEYFPSQMLRTGNNFTFSYTFEEVPFHSSYAHSQSLDRLMNPLIDQYLYYLNRTQNQSGSAQNKDLLFSRGSPAGMSVQPKNWLPGPCYRQQRVSKTKTDNNNSNFTWTGASKYNLNGRESIINPGTAMASHKDDEDKFFPMSGVMIFGKESAGASNTALDNVMITDEEEIKATNPVATERFGTVAVNFQSSSTDPATGDVHAMGALPGMVWQDRDVYLQGPIWAKIPHTDGHFHPSPLMGGFGLKNPPPQILIKNTPVPANPPAEFSATKFASFITQYSTGQVSVEIEWELQKENSKRWNPEVQYTSNYAKSANVDFTVDNNGLYTEPRPIGTRYLTRPL

SEQ ID NO: 571 - protein, 735 aa, Artificial Sequence
  Synthetic polypeptide
MAADGYLPDWLEDTLSEGIRQWWKLKPGPPPPKPAERHKDDSRGLVLPGYKYLGPFNGLDKGEPVNEADAAALEHDKAYDRQLDSGDNPYLKYNHADAEFQERLKEDTSFGGNLGRAVFQAKKRVLEPLGLVEEPVKTAPGKKRPVEHSPVEPDSSSGTGKAGQQPARKRLNFGQTGDADSVPDPQPLGQPPAAPSGLGTNTMATGSGAPMADNNEGADGVGNSSGNWHCDSTWMGDRVITTSTRTWALPTYNNHLYKQISSQSGASNDNHYFGYSTPWGYFDFNRFHCHFSPRDWQRLINNNWGFRPKRLKFKLFNIQVKEVTQNDGTTTIANNLTSTVQVFTDSEYQLPYVLGSAHQGCLPPFPADVFMVPQYGYLTLNNGSQAVGRSSFYCLEYFPSQMLRTGNNFTFSYTFEDVPFHSSYAHSQSLDRLMNPLIDQYLYYLSRTDTPSGTTTQSRLQFSQAGASDIRNQSRNWLPGPCYRQQRVSKTSADNNNSEYSWTGATKYHLNGRDSLVNPGPAMASHKDDEEKFFPQSGVLIFGKQGSEKTSVDIEKVMITDEEEIRTTNPVATEQYGSVSTNLQRGNRQAATADVNTQGVLPGMVWQDRDVYLQGPIWAKIPHTDGHFHPSPLMGGFGLKHPPPQILIKNTPVPANPSTTFSAAKFASFITQYSTGQVSVEIEWELQKENSKRWNPEVQYTSNYNKSVNVDFTVDTNGVYSEPRPIGTRYLTRNQ

SEQ ID NO: 572 - DNA, 2208 bp, Artificial Sequence
  Synthetic polynucleotide
atggctgccgatggttatcttccagattggctcgaggacactctctctgaaggaataagacagtggtggaagctcaaacctggcccaccaccaccaaagcccgcagagcggcataaggacgacagcaggggtcttgtgcttcctgggtacaagtacctcggacccttcaacggactcgacaagggagagccggtcaacgaggcagacgccgcggccctcgagcacgacaaagcctatgaccggcagctcgacagcggagacaacccgtacctcaagtacaaccacgccgacgcggagtttcaggaacgccttaaagaagatacgtcttttgggggcaacctcggacgagcagtcttccaggcgaaaaagagggttcttgaacctctgggcctggttgaggaacctgttaagacggctccgggaaaaaagaggccggtagagcactctcctgtggagccagactcctcctcgggaaccggaaaggcgggccagcagcctgcaagaaaaagattgaattttggtcagactggagacgcagactcagtacctgacccccagcctctcggacagccaccagcagccccctctggtctgggaactaatacgatggctacaggcagtggcgcaccaatggcagacaataacgagggcgccgacggagtgggtaattcctcgggaaattggcattgcgattccacatggatgggcgacagagtcatcaccaccagcacccgaacctgggccctgcccacctacaacaaccacctctacaaacaaatttccagccaatcaggagcctcgaacgacaatcactactttggctacagcaccccttgggggtattttgacttcaacagattccactgccacttttcaccacgtgactggcaaagactcatcaacaacaactggggattccgacccaagagactcaagttcaagctctttaacattcaagtcaaagaggtcacgcagaatgacggtacgacgacgattgccaataaccttaccagcacggttcaggtgtttactgactcggagtaccagctcccgtacgtcctcggctcggcgcatcaaggatgcctcccgccgttcccagcagacgtcttcatggtgccacagtatggatacctcaccctgaacaacgggagtcaggcagtaggacgctcttcattttactgcctggagtactttccttctcagatgctgcgtaccggtaacaactttaccttcagctacacttttgaggacgttcctttccacagcagctacgctcacagccagagtctggaccgtctcatgaatcctctcatcgaccagtacctgtattacttgagcagaacagacactccaagtggaaccaccacgcagtcaaggcttcagttttctcaggccggagcgagtgacattcggaaccagtctaggaactggcttcctggaccctgttaccgccagcagcgagtatcaaagacatctgcggataacaacaacagtgaatactcgtggactggagctaccaagtaccacctcaatggcagagactctctggtgaatccgggcccggccatggcaagccacaaggacgatgaagaaaagttttttcctcagagcggggttctcatctttgggaagcaaggctcagagaaaacaagtgtggacattgaaaaggtcatgattacagacgaagaggaaatcaggacaaccaatcccgtggctacggagcagtatggttctgtatctaccaacctccagagaggcaacagacaagcagctaccgcagatgtcaacacacaaggcgttcttccaggcatggtctggcaggacagagatgtgtaccttcaggggcccatctgggcaaagattccacacacggacggacattttcacccctctcccctcatgggtggattcggacttaaacaccctcctccacagattctcatcaagaacaccccggtacctgcgaatccttcgaccaccttcagtgcggcaaagtttgcttccttcatcacacagtactccacgggacaggtcagcgtggagatcgagtgggagctgcagaaggaaaacagcaaacgctggaatcccgaagttcagtacacttccaactacaacaagtctgttaatgtggactttactgtggacactaatggcgtgtattcagagcctcgccccattggcaccagatacctgactcgtaatcagtaa

SEQ ID NO: 573 - DNA, 2208 bp, Artificial Sequence
  Synthetic polynucleotide
atggctgccgatggttatcttccagattggctcgaggacactctctctgaaggaataagacagtggtggaagctcaaacctggcccaccaccaccaaagcccgcagagcggcataaggacgacagcaggggtcttgtgcttcctgggtacaagtacctcggacccttcaacggactcgacaagggagagccggtcaacgaggcagacgccgcggccctcgagcacgacaaagcctatgaccggcagctcgacagcggagacaacccgtacctcaagtacaaccacgccgacgcggagtttcaggagcgccttaaagaagatacgtcttttgggggcaacctcggacgagcagtcttccaggcgaaaaagagggttcttgaacctctgggcctggttgaggaacctgttaagacggctccgggaaaaaagaggccggtagagcactctcctgtggagccagactcctcctcgggaaccggaaaggcgggccagcagcctgcaagaaaaagattgaattttggtcagactggagacgcagactcagtacctgatccccagcctctcggacagccaccagcagccccctctggtctgggaactaatacgatggctacaggcagtggcgcaccaatggcagacaataacgagggcgccgacggagtgggtaattcctcgggaaattggcattgcgattccacatggatgggcgacagagtcatcaccaccagcacccgaacctgggccctgcccacctacaacaaccacctctacaaacaaatttccagccaatcaggagcctcgaacgacaatcactactttggctacagcaccccttgggggtattttgacttcaacagattccactgccacttttcaccacgtgactggcaaagactcatcaacaacaactggggattccgacccaagagactcaagttcaagctctttaacattcaagtcaaagaggtcacgcagaatgacggtacgacgacgattgccaataaccttaccagcacggttcaggtgtttactgactcggagtaccagctcccgtatgtcctcggctcggcgcatcaaggatgcctcccgccgttcccagcagacgtcttcatggtgccacagtatggatacctcaccctgaacaacgggagtcaggcagtaggacgctcttcattttactgcctggagtactttccttctcagatgctgcgtaccggtaacaactttaccttcagctacacttttgaggacgttcctttccacagcagctacgctcacagccagagtctggaccgtctcatgaatcctctcatcgaccagtacctgtattacttgagcagaacagacactccaagtggaaccaccacgcagtcaaggcttcagttttctcaggccggagcgagtgacattcgggaccagtctaggaactggcttcctggaccctgttaccgccagcagcgagtatcaaagacatctgcggataacaacaacagtgaatactcgtggactggagctaccaagtaccacctcaatggcagagactctctggtgaatccgggcccggccatggcaagccacaaggacgatgaagaaaagttttttcctcagagcggggttctcatctttgggaagcaaggctcagagaaaacaagtgtggacattgaaaaggtcatgattacagacgaagaggaaatcaggacaaccaatcccgtggctacggagcagtatggttctgtatctaccaacctccagagaggcaacagacaagcagctaccgcagatgtcaacacacaaggcgttcttccaggcatggtctggcaggacagagatgtgtaccttcaggggcccatctgggcaaagattccacacacggacggacattttcacccctctcccctcatgggtggattcggacttaaacaccctcctccacagattctcatcaagaacaccccggtacctgcgaatccttcgaccaccttcagtgcggcaaagtttgcttccttcatcacacagtactccacgggacaggtcagcgtggagatcgagtgggagctgcagaaggaaaacagcaaacgctggaatcccgaagttcagtacacttccaactacaacaagtctgttaatgtggactttactgtggacactaatggcgtgtattcagagcctcgccccattggcaccagatacctgactcgtaatctgtaa

SEQ ID NO: 574 - protein, 735 aa, Artificial Sequence
  Synthetic polypeptide
MAADGYLPDWLEDTLSEGIRQWWKLKPGPPPPKPAERHKDDSRGLVLPGYKYLGPFNGLDKGEPVNEADAAALEHDKAYDRQLDSGDNPYLKYNHADAEFQERLKEDTSFGGNLGRAVFQAKKRVLEPLGLVEEPVKTAPGKKRPVEHSPVEPDSSSGTGKAGQQPARKRLNFGQTGDADSVPDPQPLGQPPAAPSGLGTNTMATGSGAPMADNNEGADGVGNSSGNWHCDSTWMGDRVITTSTRTWALPTYNNHLYKQISSQSGASNDNHYFGYSTPWGYFDFNRFHCHFSPRDWQRLINNNWGFRPKRLKFKLFNIQVKEVTQNDGTTTIANNLTSTVQVFTDSEYQLPYVLGSAHQGCLPPFPADVFMVPQYGYLTLNNGSQAVGRSSFYCLEYFPSQMLRTGNNFTFSYTFEDVPFHSSYAHSQSLDRLMNPLIDQYLYYLSRTDTPSGTTTQSRLQFSQAGASDIRDQSRNWLPGPCYRQQRVSKTSADNNNSEYSWTGATKYHLNGRDSLVNPGPAMASHKDDEEKFFPQSGVLIFGKQGSEKTSVDIEKVMITDEEEIRTTNPVATEQYGSVSTNLQRGNRQAATADVNTQGVLPGMVWQDRDVYLQGPIWAKIPHTDGHFHPSPLMGGFGLKHPPPQILIKNTPVPANPSTTFSAAKFASFITQYSTGQVSVEIEWELQKENSKRWNPEVQYTSNYNKSVNVDFTVDTNGVYSEPRPIGTRYLTRNL

SEQ ID NO: 575 - DNA, 2601 bp, Artificial Sequence
  Synthetic polynucleotide
ccatcgacgtcagacgcggaagcttcgatcaactacgcggacaggtaccaaaacaaatgttctcgtcacgtgggcatgaatctgatgctgtttccctgcagacaatgcgagagactgaatcagaattcaaatatctgcttcactcacggtgtcaaagactgtttagagtgctttcccgtgtcagaatctcaacccgtttctgtcgtcaaaaaggcgtatcagaaactgtgctacattcatcacatcatgggaaaggtgccagacgcttgcactgcttgcgacctggtcaatgtggacttggatgactgtgtttctgaacaataaatgacttaaaccaggtatgactgccgatggttatcttccagattggctcgaggacaaccttagtgaaggaattcgcgagtggtgggctttgaaacctggagcccctcaacccaaggcaaatcaacaacatcaagacaacgctcgaggtcttgtgcttccgggttacaaataccttggacccggcaacggactcgacaagggggagccggtcaacgcagcagacgcggcggccctcgagcacgacaaggcctacgaccagcagctcaaggccggagacaacccgtacctcaagtacaaccacgccgacgccgagttccaggagcggctcaaagaagatacgtcttttgggggcaacctcgggcgagcagtcttccaggccaaaaagaggcttcttgaacctcttggtctggttgaggaagcggctaagacggctcctggaaagaagaggcctgtagagcagtctcctcaggaaccggactcctccgcgggtattggcaaatcgggtgcacagcccgctaaaaagagactcaatttcggtcagactggcgacacagagtcagtcccagaccctcaaccaatcggagaacctcccgcagccccctcaggtgtgggatctcttacaatggcttcaggtggtggcgcaccagtggcagacaataacgaaggtgccgatggagtgggtagttcctcgggaaattggcattgcgattcccaatggctgggggacagagtcatcaccaccagcacccgaacctgggccctgcccacctacaacaatcacctctacaagcaaatctccaacagcacatctggaggatcttcaaatgacaacgcctacttcggctacagcaccccctgggggtattttgacttcaacagattccactgccacttctcaccacgtgactggcagcgactcatcaacaacaactggggattccggcctaagcaactcaacttcaagctcttcaacattcaggtcaaagaggttacggacaacaatggagtcaagaccatcgccaataaccttaccagcacggtccaggtcttcacggactcagactatcagctcccgtacgtgctcgggtcggctcacgagggctgcctcccgccgttcccagcggacgttttcatgattcctcagtacgggtatctgacgcttaatgatggaagccaggccgtgggtcgttcgtccttttactgcctggaatatttcccgtcgcaaatgctaagaacgggtaacaacttccagttcagctacgagtttgagaacgtacctttccatagcagctacgctcacagccaaagcctggaccgactaatgaatccactcatcgaccaatacttgtactatctctcaaagactattaacggttctggacagaatcaacaaacgctaaaattcagtgtggccggacccagcaacatggctgtccagggaagaaactacatacctggacccagctaccgacaacaacgtgtctcaaccactgtgactcaaaacaacaacagcgaatttgcttggcctggagcttcttcttgggctctcaatggacgtaatagcttgatgaatcctggacctgctatggccagccacaaagaaggagaggaccgtttctttcctttgtctggatctttaatttttggcaaacaaggaactggaagagacaacgtggatgcggacaaagtcatgataaccaacgaagaagaaattaaaactactaacccggtagcaacggagtcctatggacaagtggccacaaaccaccagagtgcccaagcacaggcgcagaccggctgggttcaaaaccaaggaatacttccgggtatggtttggcaggacagagatgtgtacctgcaaggacccatttgggccaaaattcctcacacggacggcaactttcacccttctccgctgatgggagggtttggaatgaagcacccgcctcctcagatcctcatcaaaaacacacctgtacctgcggatcctccaacggccttcaacaaggacaagctgaactctttcatcacccagtattctactggccaagtcagcgtggagatcgagtgggagctgcagaaggaaaacagcaagcgctggaacccggagatccagtacacttccaactattacaagtctaataatgttgaatttgctgttaatactgaaggtgtatatagtgaaccccgccccattggcaccagatacctgactcgtaatctgtaattgcttgttaatcaataaaccgtttaattcgtttcagttgaactgcggcc

SEQ ID NO: 576 - DNA, 2601 bp, Artificial Sequence
  Synthetic polynucleotide
ccatcgacgtcagacgcggaagcttcgatcaactacgcggacaggtaccaaaacaaatgttctcgtcacgtgggcatgaatctgatgctgtttccctgcagacaatgcgagagactgaatcagaattcaaatatctgcttcactcacggtgtcaaagactgtttagagtgctttcccgtgtcagaatctcaacccgtttctgtcgtcaaaaaggcgtatcagaaactgtgctacattcatcacatcatgggaaaggtgccagacgcttgcactgcttgcgacctggtcaatgtggacttggatgactgtgtttctgaacaataaatgacttaaaccaggtatggctgccgatggttatcttccagattggctcgaggacaaccttagtgaaggaattcgcgagtggtgggctttgaaacctggagcccctcaacccaaggcaaatcaacaacatcaagacaacgctcgaggtcttgtgcttccgggttacaaataccttggacccggcaacggactcgacaagggggagccggtcaacgcagcagacgcggcggccctcgagcacgacaaggcctacgaccagcagctcaaggccggagacaacccgtacctcaagtacaaccacgccgacgccgagttccaggagcggctcaaagaagatacgtcttttgggggcaacctcgggcgagcagtcttccaggccaaaaagaggcttcttgaacctcttggtctggttgaggaagcggctaagacggctcctggaaagaagaggcctgtagagcagtctcctcaggaaccggactcctccgcgggtattggcaaatcgggtgcacagcccgctaaaaagagactcaatttcggtcagactggcgacacagagtcagtcccagaccctcaaccaatcggagaacctcccgcagccccctcaggtgtgggatctcttacaatggcttcaggtggtggcgcaccagtggcagacaataacgaaggtgccgatggagtgggtagttcctcgggaaattggcattgcgattcccaatggctgggggacagagtcatcaccaccagcacccgaacctgggccctgcccacctacaacaatcacctctacaagcaaatctccaacagcacatctggaggatcttcaaatgacaacgcctacttcggctacagcaccccctgggggtattttgacttcaacagattccactgccacttctcaccacgtgactggcagcgactcatcaacaacaactggggattccggcctaagcgactcaacttcaagctcttcaacattcaggtcaaagaggttacggacaacaatggagtcaagaccatcgccaataaccttaccagcacggtccaggtcttcacggactcagactatcagctcccgtacgtgctcgggtcggctcacgagggctgcctcccgccgttcccagcggacgttttcatgattcctcagtacgggtatctgacgcttaatgatggaagccaggccgtgggtcgttcgtccttttactgcctggaatatttcccgtcgcaaatgctaagaacgggtaacaacttccagttcagctacgagtttgagaacgtacctttccatagcagctacgctcacagccaaagcctggaccgactaatgaatccactcatcgaccaatacttgtactatctctcaaagactattaacggttctggacagaatcaacaaacgctaaaattcagtgtggccggacccagcaacatggctgtccagggaagaaactacatacctggacccagctaccgacaacaacgtgtctcaaccactgtgactcaaaacaacaacagcgaatttgcttggcctggggcttcttcttgggctctcaatggacgtaatagcttgatgaatcctggacctgctatggccagccacaaagaaggagaggaccgtttctttcctttgtctggatctttaatttttggcaaacaaggaactggaagagacaacgtggatgcggacaaagtcatgataaccaacgaagaagaaattaaaactactaacccggtagcaacggagtcctatggacaagtggccacaaaccaccagagtgcccaagcacaggcgcagaccggctgggttcaaaaccaaggaatacttccgggtatggtttggcaggacagagatgtgtacctgcaaggacccatttgggccaaaattcctcacacgggcggcaactttcacccttctccgctgatgggagggtttggaatgaagcacccgcctcctcagatcctcatcaaaaacacacctgtacctgcggatcctccaacggccttcaacaaggacaagctgaactctttcatcacccagtattctactggccaagtcagcgtggagatcgagtgggagctgcagaaggaaaacagcaagcgctggaacccggagatccagtacacttccaactattacaagtctaataatgttgaatttgctgttaatactggaggtgtatatagtgaaccccgccccattggcaccagatacctgactcgtaatctgtaattgcttgttaatcaataaaccgtttaattcgtttcagttgaactgcggcc

SEQ ID NO: 577 - DNA, 2601 bp, Artificial Sequence
  Synthetic polynucleotide
ccatcgacgtcagacgcggaagcttcgatcaactacgcggacaggtaccaaaacaaatgttctcgtcacgtgggcatgaatctgatgctgtttccctgcagacaatgcgagagactgaatcagaattcaaatatctgcttcactcacggtgtcaaagactgtttagagtgctttcccgtgtcagaatctcaacccgtttctgtcgtcaaaaaggcgtatcagaaactgtgctacattcatcacatcatgggaaaggtgccagacgcttgcactgcttgcgacctggtcaatgtggactcggatgactgtgtttctgaacaataaatgacttaaaccaggtatggctgccgatggttatcttccagattggctcgaggacaaccttagtgaaggaattcgcgagtggtgggctttgaaacctggagcccctcaacccaaggcaaatcaacaacatcaagacaacgctcgaggtcttgtgcttccgggttacaaataccttggacccggcaacggactcgacaagggggagccggtcaacgcagcagacgcggcggccctcgagcacgacaaggcctacgaccagcagctcaaggccggagacaacccgtacctcaagtacaaccacgccgacgccgagttccaggagcggctcaaagaagatacgtcttttgggggcaacctcgggcgagcagtcttccaggccaaaaagaggcttcttgaacctcttggtctggttgaggaagcggctaagacggctcctggaaagaagaggcctgtagagcagtctcctcaggaaccggactcctccgcgggtattgacaaatcgggtgcacagcccgctaaaaagagactcaatttcggtcagactggcgacacagagtcagtcccagaccctcaaccaatcggagaacctcccgcagccccctcaggtgtgggatctcttacaatggcttcaggtggtggcgcaccagtggcagacaataacgaaggtgccgatggagtgggtagttcctcgggaaattggcattgcgattcccaatggctgggggacagagtcatcaccaccagcacccgaacctgggccctgcccacctacaacaatcacctctacaagcaaatctccaacagcacatctggaggatcttcaaatgacaacgcctacttcggctacagcaccccctgggggtattttgacttcaacagattccactgccacttctcaccacgtgactggcagcgactcatcaacaacaactggggattccggcctaagcgactcaacttcaagctcttcaacattcaggtcaaagaggttacggacaacaatggagtcaagaccatcgccaataaccttaccagcacggtccaggtcttcacggactcggactatcagctcccgtacgtgctcgggtcggctcacgagggctgcctcccgccgttcccagcggacgttttcatgattcctcagtacgggtatctgacgcttaatgatggaagccaggccgtgggtcgttcgtccttttactgcctggaatatttcccgtcgcaaatgctaagaacgggtaacaacttccagttcagctacgagtttgagaacgtacctttccatagcagctacgctcacagccaaagcctggaccgactaatgaatccactcatcgaccaatacttgtactatctctcaaagactattaacggttctggacagaatcaacaaacgctaaaattcagtgtggccggacccagcaacatggctgtccagggaagaaactacatacctggacccagctaccgacaacaacgtgtctcaaccactgtgactcaaaacaacaacagcgaatttgcttggcctggagcttcttcttgggctctcaatggacgtaatagcttgatgaatcctggacctgctatggccagccacaaagaaggagaggaccgtttctttcctttgtctggatctttaatttttggcaaacaaggaactggaagagacaacgtggatgcggacaaagtcatgataaccaacgaagaagaaattaaaactactaacccggtagcaacggagtcctatggacaagtggccacaaaccaccagagtgcccaagcacaggcgcagaccggctgggttcaaaaccaaggaatacttccgggtatggtttggcaggacagagatgtgtacctgcaaggacccatttgggccaaaattcctcacacggacggcaactttcacccttctccgctgatgggagggtttggaatgaagcacccgcctcctcagatcctcatcaaaaacacacctgtacctgcggatcctccaacggccttcaacaaggacaagctgaactctttcatcacccagtattctactggccaagtcagcgtggagatcgagtgggagctgcagaaggaaaacagcaagcgctggaacccggagatccagtacacttccaactattacaagtctaataatgttgaatttgctgttaatactgaaggtgtatatagtgaaccccgccccattggcaccagatacctgactcgtaatctgtaattgcttgttaatcaataaaccgtttaattcgtttcagttgaactgcggcc

SEQ ID NO: 578 - DNA, 2601 bp, Artificial Sequence
  Synthetic polynucleotide
ccatcgacgtcagacgcggaagcttcgatcaactacgcggacaggtaccaaaacaaatgttctcgtcacgtgggcatgaatctgatgctgtttccctgcagacaatgcgagagactgaatcagaattcaaatatctgcttcactcacggtgtcaaagactgtttagagtgctttcccgtgtcagaatctcaacccgtttctgtcgtcaaaaaggcgtatcagaaactgtgctacattcatcacatcatgggaaaggtgccagacgcttgcactgcttgcgacctggtcaatgtggacttggatgactgtgtttctgaacaataaatgacttaaaccaggtatggctgccgatggttatcttccagattggctcgaggacaaccttagtgaaggaattcgcgagtggtgggctttgaaacctggagcccctcaacccaaggcaaatcaacaacatcaagacaacgctcgaggtcttgtgcttccgggttacaaataccttggacccggcaacggactcgacaagggggagccggtcaacgcagcagacgcggcggccctcgagcacgacaaggcctacgaccagcagctcaaggccggagacaacccgtacctcaagtacaaccacgccgacgccgagttccaggagcggctcaaagaagatacgtcttttgggggcaacctcgggcgagcagtcctccaggccaaaaagaggcttcttgaacctcttggtctggttgaggaagcggctaagacggctcctggaaagaagaggcctgtagagcagtctcctcaggaaccggactcctccgcgggtattggcaaatcgggtgcacagcccgctaaaaagagactcaatttcggtcagactggcgacacagagtcagtcccagaccctcaaccaatcggagaacctcccgcagccccctcaggtgtgggatctcttacaatggcttcaggtggtggcgcaccagtggcagacaataacgaaggtgccgatggagtgggtagttcctcgggaaattggcattgcgattcccaatggctgggggacagagtcatcaccaccagcacccgaacctgggccctgcccacctacaacaatcacctctacaagcaaatctccaacagcacatctggaggatcttcaaatgacaacgcctacttcggctacagcaccccctgggggtattttgacttcaacagattccactgccacttctcaccacgtgactggcagcgactcatcaacaacaactggggattccggcctaagcgactcaacttcaagctcttcaacattcaggtcaaagaggttacggacaacaatggagtcaagaccatcgccaataaccttaccagcacggtccaggtcttcacggactcagactatcagctcccgtacgtgctcgggtcggctcacgagggctgcctcccgccgttcccagcggacgttttcatgattcctcagtacgggtatctgacgcttaatgatggaagccaggccgtgggtcgttcgtccttttactgcctggaatatttcccgtcgcaaatgctaagaacgggtaacaacttccagttcagctacgagtttgagaacgtacctttccatagcagctacgctcacagccaaagcctggaccgactaatgaatccactcatcgaccaatacttgtactatctctcaaagactattaacggttctggacagaatcaacaaacgctaaaattcagtgtggccggatccagcaacatggctgtccagggaagaaactacatacctggacccagctaccgacaacaacgtgtctcaaccactgtgactcaaaacaacaacagcgaatttgcttggcctggagcttcttcttgggctctcaatggacgtaatagcttgatgaatcctggacctgctatggccagccacaaagaaggagaggaccgtttctttcctttgtctggatctttaatttttggcaaacaaggaactggaagagacaacgtggatgcggacaaagtcatgataaccaacgaagaagaaattaaaactactaacccggtagcaacggagtcctatggacaagtggccacaaaccaccagagtgcccaagcacaggcgcagaccggctgggttcaaaaccaaggaatacttccaggtatggtttggcaggacagagatgtgtacctgcaaggacccatttgggccaaaattcctcacacggacggcaactttcacccttctccgctgatgggagggtttggaatgaagcacccgcctcctcagatcctcatcaaaaacacacctgtacctgcggatcctccaacggccttcaacaaggacaagctgaactctttcatcacccagtattctactggccaagtcagcgtggagatcgagtgggagctgcagaaggaaaacagcaagcgctggaacccggagatccagtacacttccaactattacaagtctaataatgttgaatttgctgttaatactgaaggtgtatatagtgaaccccgccccattggcaccagatacctgactcgtaatctgtaattgcttgttaatcaataaaccgtttaattcgtttcagttgaactgcggcc

SEQ ID NO: 579 - DNA, 2601 bp, Artificial Sequence
  Synthetic polynucleotide
ccatcgacgtcagacgcggaagcttcgatcaactacgcggacaggtaccaaaacaaatgttctcgtcacgtgggcatgaatctgatgctgtttccctgcagacaatgcgagagactgaatcagaattcaaatatctgcttcactcacggtgtcaaagactgtttagagtgctttcccgtgtcagaatctcaacccgtttctgtcgtcaaaaaggcgtatcagaaactgtgctacattcatcacatcatgggaaaggtgccagacgcttgcactgcttgcgacctggtcaatgtggacttggatgactgtgtttctgaacaataaatgacttaaaccaggtatggctgccgatggttatcttccagattggctcgaggacaaccttagtgaaggaattcgcgagtggtgggctttgaaacctggagcccctcaacccaaggcaaatcaacaacatcaagacaacgctcgaggtcttgtgcttccgggttacaaataccttggacccggcaacggactcgacaagggggagccggtcaacgcagcagacgcggcggccctcgagcacgacagggcctacgaccagcagctcaaggccggagacaacccgtacctcaagtacaaccacgccgacgccgagttccaggagcggctcaaagaagatacgtcttttgggggcaacctcgggcgagcagtcttccaggccaaaaagaggcttcttgaacctcttggtctggttgaggaagcggctaagacggctcctggaaagaagaggcctgtagagcagtctcctcaggaaccggactcctccgcgggtattggcaaatcgggtgcacagcccgctaaaaagagactcaatttcggtcagactggcgacacagagtcagtcccagaccctcaaccaatcggagaacctcccgcagccccctcaggtgtgggatctcttacaatggcttcaggtggtggcgcaccagtggcagacaataacgaaggtgccgatggagtgggtagttcctcgggaaattggcattgcgattcccaatggctgggggacagagtcatcaccaccagcacccgaacctgggccctgcccacctacaacaatcacctctacaagcaaatctccaacagcacatctggaggatcttcaaatgacaacgcctacttcggctacagcaccccctgggggtattttgacttcaacagattccactgccacttctcaccacgtgactggcagcgactcatcaacaacaactggggattccggcctaagcgactcaacttcaagctcttcaacattcaggtcaaagaggttacggacaacaatggagtcaagaccatcgccaataaccttaccagcacggtccaggtcttcacggactcagactatcagctcccgtacgtgctcgggtcggctcacgagggctgcctcccgccgttcccagcggacgttttcatgattcctcagtacgggtatctgacgcttaatgatggaagccaggccgtgggtcgttcgtccttttactgcctggaatatttcccgtcgcaaatgctaagaacgggtaacaacttccagttcagctacgagtttgagaacgtacctttccatagcagctacgctcacagccaaagcctggaccgactaatgaatccactcatcgaccaatacttgtactatctctcaaagactattaacggttctggacagaatcaacaaacgctaaaattcagtgtggccggacctagcaacatggctgtccagggaagaaactacatacctggacccagctaccgacaacaacgtgtctcaaccactgtgactcaaaacaacaacagcgaatttgcttggcctggagcttcttcttgggctctcaatggacgtaatagcttgatgaatcctggacctgctatggccagccacaaagaaggagaggaccgtttctttcctttgtctggatctttaatttttggcaaacaaggaactggaagagacaacgtggatgcggacaaagtcatgataaccaacgaagaagaaattaaaactactaacccggtagcaacggagtcctatggacaagtggccacaaaccaccagagtgcccaagcacaggcgcagaccggctgggttcaaaaccaaggaatacttccgggtatggtttggcaggacagagatgtgtacctgcaaggacccatttgggccaaaattcctcacacggacggcaactttcacccttctccgctgatgggagggtttggaatgaagcacccgcctcctcagatcctcatcaaaaacacacctgtacctgcggatcctccaacggccttcaacaaggacaagctgaactctttcatcacccagtattctactggccaagtcagcgtggagatcgagtgggagctgcagaagaaaaacagcaagcgctggaacccggagatccagtacacttccaactattacaagtctaataatgttgaatttgctgttaacactgaaggtgtatatagtgaaccccgccccattggcaccagatacctgactcgtaatctgtaattgcttgttaatcaataaaccgtttaattcgtttcagttgaactgcggcc

SEQ ID NO: 580 - DNA, 2601 bp, Artificial Sequence
  Synthetic polynucleotide
ccatcgacgtcagacgcggaagcttcgatcaactacgcggacaggtaccaaaacaaatgttctcgtcacgtgggcatgaatctgatgctgtttccctgcagacaatgcgagagactgaatcagaattcaaatatctgcttcactcacggtgtcaaagactgtttagagtgctttcccgtgtcagaatctcaacccgtttctgtcgtcaaaaaggcgtatcagaaactgtgctacattcatcacatcatgggaaaggtgccagacgcttgcactgcttgcgacctggtcaatgtggacttggatgactgtgtttctgaacaataaatgacttaaaccaggtatggctgccgatggttatcttccagattggctcgaggacaaccttagtgaaggaattcgcgagtggtgggctttgaaacctggagcccctcaacccaaggcaaatcaacaacatcaagacaacgctcgaggtcttgtgcttccgggttacaaataccttggacccggcaacggactcgacaagggggagccggtcaacgcagcagacgcggcggccctcgagcacgacaaggcctacgaccagcagctcaaggccggagacaacccgtacctcaagtacaaccacgccgacgccgagttccaggagcggctcaaagaagatacgtcttttgggggcaacctcgggcgagcagtcttccaggccaaaaagaggcttcttgaacctcttggtctggttgaggaagcggctaagacggctcctggaaagaagaggcctgtagagcagtctcctcaggaaccggactcctccgcgggtattggcaaatcgggtgcacagcccgctaaaaagagactcaatttcggtcagactggcgacacagagtcagtcccagaccctcaaccaatcggagaacctcccgcagccccctcaggtgtgggatctcttacaatggcttcaggtggtggcgcaccagtggcagacaataacgaaggtgccgatggagtgggtagttcctcgggaaattggcattgcgattcccaatggctgggggacagagtcatcaccaccagcacccgaacctgggccctgcccacctacaacaatcacctctacaagcaaatctccaacagcacatctggaggatcttcaaatgacaacgcctacttcggctacagcaccccctgggggtattttgacttcaacagattccactgccacttctcaccacgtgactggcagcgactcatcaacaacaactggggattccggcctaagcgactcaacttcaagctcttcaacattcaggtcaaagaggttacggacaacaatggagtcaagaccatcgccaataaccttaccagcacggtccaggtcttcacggactcagactatcagctcccgtacgtgctcgggtcggctcacgagggctgcctcccgccgttcccagcggacgttttcatgattcctcagtacgggtatctgacgcttaatgatggaagccaggccgtgggtcgttcgtccttttactgcctggaatatttcccgtcgcaaatgctaagaacgggtaacaacttccagttcagctacgagtttgagaacgtacctttccatagcagctacgctcacagccaaagcctggaccgactaatgaatccactcatcgaccaatacttgtactatctctcaaagactattaacggttctggacagaatcaacaaacgctaaaattcagtgtggccggacccagcaacatggctgtccagggaagaaactacatacctggacccagctaccgacaacaacgtgtctcaaccactgtgactcaaaacaacaacagcgaatttgcttggcctggagcttcttcttgggctctcaatggacgtaatagcttgatgaatcctggacctgctatggccagccacaaagaaggagaggaccgtttctttcctttgtctggatctttaatttttggcaaacaaggaactggaagagacaacgtggatgcggacaaagtcatgataaccaacgaagaagaaattaaaactactaacccggtagcaacggagtcctatggacaagtggccacaaaccaccagagtgcccaagcacgggcgcagaccggctgggttcaaaaccaaggaatacttccgggtatggtttggcaggacagagatgtgtacctgcaaggacccatttgggccaaaattcctcacacggacggcaactttcacccttctccgctgatgggagggtttggaatgaagcacccgcctcctcagatcctcatcaaaaacacacctgtacctgcggatcctccaacggccttcaacaaggacaagctgaactctttcatcacccagtattctactggccaagtcagcgtggagatcgagtgggagctgcagaaggaaaacagcaagcgctggaacccggagatccagtacacttccaactattacaagtctaataatgttgaatttgctgttaatactgaaggtgtatatagtgaaccccgccccattggcaccagatacctgactcgtaatctgtaattgcttgttaatcaataaaccgtttaattcgtttcagttgaactgcggcc

SEQ ID NO: 581 - DNA, 2601 bp, Artificial Sequence
  Synthetic polynucleotide
ccatcgacgtcagacgcggaagcttcgatcaactacgcggacaggtaccaaaacaaatgttctcgtcacgtgggcatgaatctgatgctgtttccctgcagacaatgcgagagactgaatcagaattcaaatatctgcttcactcacggtgtcaaagactgtttagagtgctttcccgtgtcagaatctcaacccgtttctgtcgtcaaaaaggcgtatcagaaactgtgctacattcatcacatcatgggaaaggtgccagacgcttgcactgcttgcgacctggtcaatgtggacttggatgactgtgtttctgaacaataaatgacttaaaccaggtatggctgccgatggttatcttccagattggctcgaggacaaccttagtgaaggaattcgcgagtggtgggctttgaaacctggagcccctcaacccaaggcaaatcaacaacatcaagacaacgctcgaggtcttgtgcttccgggttacaaataccttggacccggcaacggactcgacaagggggagccggtcaacgcagtagacgcggcggccctcgagcacgacaaggcctacgaccagcagctcaaggccggagacaacccgtacctcaagtacaaccacgccgacgccgagttccaggagcggctcaaagaagatacgtcttttgggggcaacctcgggcgagcagtcttccaggccaaaaagaggcttcttgaacctcttggtctggttgaggaagcggctaagacggctcctggaaagaagaggcctgtagagcagtctcctcaggaaccggactcctccgcgggtattggcaaatcgggtgcacagcccgctaaaaagagactcaatttcggtcagactggcgacacagagtcagtcccagaccctcaaccaatcggagaacctcccgcagccccctcaggtgtgggatctcttacaatggcttcaggtggtggcgcaccagtggcagacaataacgaaggtgccgatggagtgggtagttcctcgggaaattggcattgcgattcccaatggctgggggacagagtcatcaccaccagcacccgaacctgggccctgcccacctacaacaatcacctctacaagcaaatctccaacagcacatctggaggatcttcaaatgacaacgcctacttcggctacagcaccccctgggggtattttgacttcaacagattccactgccacttctcaccacgtgactggcagcgactcatcaacaacaactggggatttcggcctaagcgactcaacttcaagctcttcaacattcaggtcaaagaggttacggacaacaatggagtcaagaccatcgccaataaccttaccagcacggtccaggtcttcacggactcagactatcagctcccgtacgtgctcgggtcggctcacgagggctgcctcccgccgttcccagcggacgttttcatgattcctcagtacgggtatctgacgcttaatgatggaagccaggccgtgggtcgttcgtccttttactgcctggaatatttcccgtcgcaaatgctaagaacgggtaacaacttccagttcagctacgagtttgagaacgtacctttccatagcagctacgctcacagccaaagcctggaccgactaatgaatccactcatcgaccaatacttgtactatctctcaaagactattaacggttctggacagaatcaacaaacgctaaaattcagtgtggccggacccagcaacatggctgtccagggaagaaactacatacctggacccagctaccgacaacaacgtgtctcaaccactgtgactcaaaacaacaacagcgaatttgcttggcctggagcttcttcttgggctctcaatggacgtaatagcttgatgaatcctggacctgctatggccagccacaaagaaggagaggaccgtttctttcctttgtctggatctttaatttttggcaaacaaggaactggaagagacaacgtggatgcggacaaagtcatgataaccaacgaagaagaaattaaaactactaacccggtagcaacggagtcctatggacaagtggccacaaaccaccagagtgcccaagcacaggcgcagaccggctgggttcaaaaccaaggaatacttccgggtatggtttggcaggacagagatgtgtacctgcaaggacccatttgggccaaaattcctcacacggacggcaactttcacccttctccgctgatgggagggtttggaatgaagcacccgcctcctcagatcctcatcaaaaacacacctgtacctgcggatcctccaacggccttcaacaaggacaagctgaactctttcatcacccagtattctactggccaagtcagcgtggagatcgagtgggagctgcagaaggaaaacagcaagcgctggaacccggagatccagtacacttccaactattacaagtctaataatgttgaatttgctgttaatactgaaggtgtatatagtgaaccccgccccattggcaccagatacctgactcgtaatctgtaattgcttgttaatcaataaaccgtttaattcgtttcagttgaactgcggcc

SEQ ID NO: 582 - DNA, 2580 bp, Artificial Sequence
  Synthetic polynucleotide
ccatcgacgtcagacgcggaagcttcgatcaactacgcggacaggtaccaaaacaaatgttctcgtcacgtgggcatgaatctgatgctgtttccctgcagacaatgcgagagactgaatcagaattcaaatatctgcttcactcacggtgtcaaagactgtttagagtgctttcccgtgtcagaatctcaacccgtttctgtcgtcaaaaaggcgtatcagaaactgtgctacattcatcacatcatgggaaaggtgccagacgcttgcactgcttgcgacctggtcaatgtggacttggatgactgtgtttctgaacaataaatgacttaaaccaggtatggctgccgatggttatcttccagattggctcgaggacaaccttagtgaaggaattcgcgagtggtgggctttgaaacctggagcccctcaacccaaggcaaatcaacaacatcaagacaacgctcgaggtcttgtgcttccgggttacaaataccttggacccggcaacggactcgacaagggggagccggtcaacgcagcagacgcggcggccctcgagcacgacaaggcctacgaccagcagctcaaggccggagacaacccgtacctcaagtacaaccacgccgacgccgagttccaggagcggctcaaagaagatacgtcttttgggggcaacctcgggcgagcagtcttccaggccaaaaagaggcttcttgaacctcttggtctggttgaggaagcggctaagacggctcctggaaagaagaggcctgtagagcagtctcctcgggaaccggactcctccgcgggtattggcaaatcgggtgcacagcccgctaaaaagagactcaatttcggtcagactggcgacacagagtcagtcccagaccctcaaccaatcggagaacctcccgcagccccctcaggtgtgggatctcttacaatggcttcaggtggtggcgcaccagtggcagacaataacgaaggtgccgatggagtgggtagttcctcgggaaattggcattgcgattcccaatggctgggggacagagtcatcaccaccagcacccgaacctgggccctgcccacctacaacaatcacctctacaagcaaatctccaacagcacatctggaggatcttcaaatgacaacgcctacttcggctacagcaccccctgggggtattttgacttcaacagattccactgccacttctcaccacgtgactggcagcgactcatcaacaacaactggggattccggcctaagcgactcaacttcaagctcttcaacattcaggtcaaagaggttacggacaacaatggagtcaagaccatcgccaataaccttaccagcacggtccaggtcttcacggactcagactatcagctcccgtacgtgctcgggtcggctcacgagggctgcctcccgccgttcccagcggacgttttcatgattcctcagtacgggtatctgacgcttaatgatggaagccaggccgtgggtcgttcgtccttttactgcctggaatatttcccgtcgcaaatgctaagaacgggtaacaacttccagttcagctacgagtttgagaacgtacctttccatagcagctacgctcacagccaaagcctggaccgactaatgaatccactcatcgaccaatacttgtactatctctcaaagactattaacggttctggacagaatcaacaaacgctaaaattcagtgtggccggacccagcaacatggctgtccagggaagaaactacatacctggacccagctaccgacaacaacgtgtctcaaccactgtgactcaaaacaacaacagcgaatttgcttggcctggagcttcttcttgggctctcaatggacgtaatagcttgatgaatcctggacctgctatggccagccacaaagaaggagaggaccgtttctttcctttgtctggatctttaatttttggcaaacaaggaactggaagagacaacgtggatgcggacaaagtcatgataaccaacgaagaagaaattaaaactactaacccggtagcaacggagtcctatggacaagtggccacaaaccaccagagtgcccaagcacaggcgcagaccggctgggttcaaaaccaaggaatacttccgggtatggtttggcaggacagagatgtgtacctgcaaggacccatttgggccaaaattcctcacacggacggcaactttcacccttctccgctgatgggagggtttggaatgaagcacccgcctcctcagatcctcatcaaaaacacacctgtacctgcggatcctccaacggccttcaacaaggacaagctgaactctttcatcacccagtattctactggccaagtcagcgtggagatcgagtgggaactgcagaaggaaaacagcaagcgctggaacccggagatccagtacacttccaactattacaagtctaataatgttgaatttgctgttaatactgaaggtgtatatagtgaaccccgccccattggcaccagatacctgactcgtaatctgtaattgcttgttaatcaataaaccgtttaatt

SEQ ID NO: 583 - DNA, 2601 bp, Artificial Sequence
  Synthetic polynucleotide
ccatcgacgtcagacgcggaagcttcgatcaactacgcggacaggtaccaaaacaaatgttctcgtcacgtgggcatgaatctgatgctgtttccctgcagacaatgcgagagactgaatcagaattcaaatatctgcttcactcacggtgtcaaagactgtttagagtgctttcccgtgtcagaatctcaacccgtttctgtcgtcaaaaaggcgtatcagaaactgtgctacattcatcacatcatgggaaaggtgccagacgcttgcactgcttgcgacctggtcaatgtggacttggatgactgtgtttctgaacaataaatgacttaaaccaggtatggctgccgatggttatcttccagattggctcgaggacaaccttagtgaaggaattcgcgagtggtgggctttgaaacctggagcccctcaacccaaggcaaatcaacaacatcaagacaacgctcgaggtcttgtgcttccgggttacaaataccttggacccggcaacggactcgacaagggggagccggtcaacgcagcagacgcggcggccctcgagcacgacaaggcctacgaccagcagctcaaggccggagacaacccgtacctcaagtacaaccacgccgacgccgagttccaggagcggctcaaagaagatacgtcttttgggggcaacctcgggcgagcagtctttcaggccaaaaagaggcttcttgaacctcttggtctggttgaggaagcggctaagacggctcctggaaagaagaggcctgtagagcagtctcctcaggaaccggactcctccgcgggtattggcaaatcgggtgcacagcccgctaaaaagagactcaatttcggtcagactggcgacacagagtcagtcccagaccctcaaccaatcggagaacctcccgcagccccctcaggtgtgggatctcttacaatggcttcatgtggtggcgcaccagtggcagacaataacgaaggtgccgatggagtgggtagttcctcgggaaattggcattgcgattcccaatggctgggggacagagtcatcaccaccagcacccgaacctgggccctgcccacctacaacaatcacctctacaagcaaatctccaacagcacatctggaggatcttcaaatgacaacgcctacttcggctacagcaccccctgggggtattttgacttcaacagattccactgccacttctcaccacgtgactggcagcgactcatcaacaacaactggggattccggcctaagcgactcaacttcaagctcttcaacattcaggtcaaagaggttacggacaacaatggagtcaagaccatcgccaataaccttaccagcacggtccaggtcttcacggactcagactatcagctcccgtacgtgctcgggtcggctcacgagggctgcctcccgccgttcccagcggacgttttcatgattcctcagtacgggtatctgacgcttaatgatggaagccaggccgtgggtcgttcgtccttttactgcctggaatatttcccgtcgcaaatgctaagaacgggtaacaacttccagttcagctacgagtttgagaacgtacctttccatagcagctacgctcacagccaaagcctggaccgactaatgaatccactcatcgaccaatacttgtactatctctcaaagactattaacggttctggacagaatcaacaaacgctaaaattcagtgtggccggacccagcaacatggctgtccagggaagaaactacatacctggacccagctaccgacaacaacgtgtctcaaccactgtgactcaaaacaacaacagcgaatttgcttggcctggagcttcttcttgggctctcaatggacgtaatagcttgatgaatcctggacctgctatggccagccacaaagaaggagaggaccgtttctttcctttgtctggatctttaatttttggcaaacaaggaactggaagagacaacgtggatgcggacaaagtcatgataaccaacgaagaagaaattaaaactactaacccggtagcaacggagtcctatggacaagtggccacaaaccaccagagtgcccaagcacaggcgcagaccggctgggttcaaaaccaaggaatacttccgggtatggtttggcaggacagagatgtgtacctgcaaggacccatttgggccaaaattcctcacacggacggcaactttcacccttctccgctgatgggagggtttggaatgaagcacccgcctcctcagatcctcatcaaaaacacacctgtacctgcggatcctccaacggccttcaacaaggacaagctgaactctttcatcacccagtattctactggccaagtcagcgtggagatcgagtgggagctgcagaaggaaaacagcaagcgctggaacccggagatccagtacacttccaactattacaagtctaataatgttgaatttgctgttaatactgaaggtgtatatagtgaaccccgccccattggcaccagatacctgactcgtaatctgtaattgcttgttaatcaataaaccgtttaattcgtttcagttgaactgcggcc

SEQ ID NO: 584 - DNA, 2601 bp, Artificial Sequence
  Synthetic polynucleotide
ccatcgacgtcagacgcggaagcttcgatcaactacgcggacaggtaccaaaacaaatgttctcgtcacgtgggcatgaatctgatgctgtttccctgcagacaatgcgagagactgaatcagaattcaaatatctgcttcactcacggtgtcaaagactgtttagagtgctttcccgtgtcagaatctcaacccgtttctgtcgtcaaaaaggcgtatcagaaactgtgctacattcatcacatcatgggaaaggtgccagacgcttgcactgcttgcgacctggtcaatgtggacttggatgactgtgtttctgaacaataaatgacttaaaccaggtatggctgccgatggttatcttccagattggctcgaggacaaccttagtgaaggaattcgcgagtggtgggctttgaaacctggagcccctcaacccaaggcaaatcaacaacatcaagacaacgctcgaggtcttgtgcttccgggttacaaataccttggacccggcaacggactcgacaagggggagccgatcaacgcagcagacgcggcggccctcgagcacgacaaggcctacgaccagcagctcaaggccggagacaacccgtacctcaagtacaaccacgccgacgccgagttccaggagcggctcaaagaagatacgtcttttgggggcaacctcgggcgagcagtcttccaggccaaaaagaggcttcttgaacctcttggtctggttgaggaagcggctaagacggctcctggaaagaagaggcctgtagagcagtctcctcaggaaccggactcctccgcgggtattggcaaatcgggtgcacagcccgctaaaaagagactcaatttcggtcagactggcgacacagagtcagtcccagaccctcaaccaatcggagaacctcccgcagccccctcaggtgtgggatctcttacaatggcttcaggtggtggcgcaccagtggcagacaataacgaaggtgccgatggagtgggtagttcctcgggaaattggcattgcgattcccaatggctgggggacagagtcatcaccaccagcacccgaacctgggccctgcccacctacaacaatcacctctacaagcaaatctccaacagcacatctggaggatcttcaaatgacaacgcctacttcggctacagcaccccctgggggtattttgacttcaacagattccactgccacttctcaccacgtgactggcagcgactcatcaacaacaactggggattccggcctaagcgactcaacttcaagctcttcaacattcaggtcaaagaggttacggacaacaatggagtcaagaccatcgccaataaccttaccagcacggtccaggtcttcacggactcagactatcagctcccgtacgtgctcgggtcggctcacgagggctgcctcccgccgttcccagcggacgttttcatgattcctcagtacgggtatctgacgcttaatgatggaagccaggccgtgggtcgttcgtccttttactgcctggaatatttcccgtcgcaaatgctaagaacgggtaacaacttccagttcagctacgagtttgagaacgtacctttccatagcagctacgctcacagccaaagcctggaccgactaatgaatccactcatcgaccaatacttgtactatctctcaaagactattaacggttctggacagaatcaacaaacgctaaaattcagtgtggccggacccagcaacatggctgtccagggaagaaactacatacctggacccagctaccgacaacaacgtgtctcaaccactgtgactcaaaacaacaacagcgaatttgcttggcctggagcttcttcttgggctctcaatggacgtaatagcttgatgaatcctggacctgctatggccagccacaaagaaggagaggaccgtttctttcctttgtctggatctttaatttttggcaaacaaggaactggaagagacaacgtggatgcggacaaagtcatgataaccaacgaagaagaaattaaaactactaacccggtagcaacggagtcctatggacaagtggccacaaaccaccagagtgcccaagcacaggcgcagaccggctgggttcaaaaccaaggaatacttccgggtatggtttggcaggacagagatgtgtacctgcaaggacccatttgggccaaaattcctcacacgtacggcaactttcacccttctccgctgatgggagggtttggaatgaagcacccgcctcctcagatcctcatcaaaaacacacctgtacctgcggatcctccaacggccttcaacaaggacaagctgaactctttcatcacccagtattctactggccaagtcagcgtggagatcgagtgggagctgcagaaggaaaacagcaagcgctggaacccggagatccagtacacttccaactattacaagtctaataatgttgaatttgctgttaatactgaaggtgtatatagtgaaccccgccccattggcaccagatacctgactcgtaatctgtaattgcttgttaatcaataaaccgtttaattcgtttcagttgaactgcggcc

SEQ ID NO: 585 - DNA, 2601 bp, Artificial Sequence
  Synthetic polynucleotide
ccatcgacgtcagacgcggaagcttcgatcaactacgcggacaggtaccaaaacaaatgttctcgccacgtgggcatgaatctgatgctgtttccctgcagacaatgcgagagactgaatcagaattcaaatatctgcttcactcacggtgtcaaagactgtttagagtgctttcccgtgtcagaatctcaacccgtttctgtcgtcaaaaaggcgtatcagaaactgtgctacattcatcacatcatgggaaaggtgccagacgcttgcactgcttgcgacctggtcaatgtggacttggatgactgtgtttctgaacaataaatgacttaaaccaggtatggctgccgatggttatcttccagattggctcgaggacaaccttagtgaaggaattcgcgagtggtgggctttgaaacctggagcccctcaacccaaggcaaatcaacaacatcaagacaacgctcgaggtcttgtgcttccgggttacaaataccttggacccggcaacggactcgacaagggggagccggtcaacgcagcagacgcggcggccctcgagcacgacaaggcctacgaccagcagctcaaggccggagacaacccgtacctcaagtacaaccacgccgacgccgagttccaggagcggctcaaagaagatacgtcttttgggggcaacctcgggcgagcagtcttccaggccaaaaagaggcttcttgaacctcttggtctggttgaggaagcggctaagacggctcctggaaagaagaggcctgtagagcagtctcctcaggaaccggactcctccgcgggtattggcaaatcgggtgcacagcccgctaaaaagagactcaatttcggtcagactggcgacacagagtcagtcccagaccctcaaccaatcggagaacctcccgctgccccctcaggtgtgggatctcttacaatggcttcaggtggtggcgcaccagtggcagacaataacgaaggtgccgatggagtgggtagttcctcgggaaattggcattgcgattcccaatggctgggggacagagtcatcaccaccagcacccgaacctgggccctgcccacctacaacaatcacctctacaagcaaatctccaacagcacatctggaggatcttcaaatgacaacgcctacttcggctacagcaccccctgggggtattttgacttcaacagattccactgccacttctcaccacatgactggcagcgactcatcaacaacaactggggattccggcctaagcgactcaacttcaagctcttcaacattcaggtcaaagaggttacggacaacaatggagtcaagaccatcgccaataaccttaccagcacggtccaggtcttcacggactcagactatcagctcccgtacgtgctcgggtcggctcacgagggctgcctcccgccgttcccagcggacgttttcatgattcctcagtacgggtatctgacgcttaatgatggaagccaggccgtgggtcgttcgtccttttactgcctggaatatttcccgtcgcaaatgctaagaacgggtaacaacttccagttcagctacgagtttgagaacgtacctttccatagcagctacgctcacagccaaagcctggaccgactaatgaatccactcatcgaccaatacttgtactatctctcaaagactattaacggttctggacagaatcaacaaacgctaaaattcaatgtggccggacccagcaacatggctgtccagggaagaaactacatacctggacccagctaccgacaacaacgtgtctcaaccactgtgactcaaaacaacaacagcgaatttgcctggcctagagcttcttcttgggctctcaatggacgtaatagcttgatgaatcctggacctgctatggccagccacaaagaaggagaggaccgtttctttcctttgtctggatctttaatttttggcaaacaaggaactggaagagacaacgtggatgcggacaaagtcatgataaccaacgaagaagaaattaaaactactaacccggtagcaacggagtcctatggacaagtggccacaaaccaccagagtgcccaagcacaggcgcagaccggctgggttcaaaaccaaggaatacttccgggtatggtttggcaggacagagatgtgtacctgcaaggacccatttgggccaaaattcctcacacggacggcaactttcacccttctccgctgatgggagggtttggaatgaagcacccgcctcctcagatcctcatcaaaaacacacctgtacctgcggatcctccaacggccttcaacaaggacaagctgaactctttcatcacccagtattctactggccaagtcagcatggagatcgagtgggagctgcagaaggaaaacagcaagcgctggaacccggagatccagtacacttccaactattacaagtctaataatgttgaatttgctgttaatactgaaggtgtatatagtgaaccccgccccattggcaccagatacctgactcgtaatctgtaattgcttgttaatcaataaaccgtttaattcgtttcagttgaactgcggcc

SEQ ID NO: 586 - DNA, 2601 bp, Artificial Sequence
  Synthetic polynucleotide
ccatcgacgtcagacgcggaagcttcgatcaactacgcggacaggtaccaaaacaaatgttctcgtcacgtgggcatgaatctgatgctgtttccctgcagacaatgcgagagactgaatcagaattcaaatatctgcttcactcacggtgtcaaagactgtttagagtgctttcccgtgtcagaatctcaacccgtttctgtcgtcaaaaaggcgtatcagaaactgtgctacattcatcacatcatgggaaaggtgccagacgcttgcactgcttgcgacctggtcaatgtggacttggatgactgtgtttctgaacaataaatgacttaaaccaggtatggctgccgatggttatcttccagattggctcgaggacaaccttagtgaaggaattcgcgagtggtgggctttgaaacctggagcccctcaacccaaggcaaatcaacaacatcaagacaacgctcgaggtcttgtgcttccgggttacaaataccttggacccggcaacggactcgacaagggggagccggtcaacgcagcagacgcggcggccctcgagcacgacaaggcctacgaccagcagctcaaggccggagacaacccgtacctcaagtacaaccacgccgacgccgagttccaggagcggctcaaagaagatacgtcttttgggggcaacctcgggcgagcagtcttccaggccaaaaagaggcttcttgaacctcttggtctggttgaggaagcggctaagacggctcctggaaagaagaggcctgtagagcagtctcctcaggaaccggactcctccgcgggtattggcaaatcgggtgcacagcccgctaaaaagagactcaatttcggtcagactggcgacacagagtcagtcccagaccctcaaccaatcggagaacctcccgcagccccctcaggtgtgggatctcttacaatggcttcaggtggtggcgcaccagtggcagacaataacgaaggtgccgatggagtgggtagttcctcgggaaattggcattgcgattcccaatggctgggggacagagtcatcaccaccagcacccgaacctgggccctgcccacctacaacaatcacctctacaagcaaatctccaacagcacatctggaggatcttcaaatgacaacgcctacttcggctacagcaccccctgggggtattttgacttcaacagattccactgccacttctcaccacgtgactggcagcgactcatcaacaacaactggggattccggcctaagcgactcaacttcaagctcttcaacattcaggtcaaagaggttacggacaacaatggagtcaagaccatcgccaataaccttaccagcacggtccaggtcttcacggactcagactatcagctcccgtacgtgctcgggtcggctcacgagggctgcctcccgccgttcccagcggacgttttcatgattcctcagtacgggtatctgacgcttaatgatggaagccaggccgtgggtcgttcgtccttttactgcctggaatatttcccgtcgcaaatgctaagaacgggtaacaacttccagttcagctacgagtttgagaacgtacctttccatagcagctacgctcacagccaaagcctggaccgactaatgaatccactcatcgaccaatacttgtactatctctcaaagactattaacggttctggacagaatcaacaaacgctaaaattcagtgtggccggacccagcaacatggctgtccagggaagaaactacatacctggacccagctaccgacaacaacgtgtctcaaccactgtgactcaaaacaacaacagcgaatttgcttggcctagagcttcttcttgggctctcaatggacgtaatagcttgatgaatcctggacctgctatggccagccacaaagaaggagaggaccgtttctttcctttgtctggatctttaatttttggcaaacaaggaactggaagagacaacgtggatgcggacaaagtcatgataaccaacgaagaagaaattaaaactactaacccggtagcaacggagtcctatggacaagtggccacaaaccaccagagtgcccaagcacaggcgcagaccggctgggttcaaaaccaaggaatacttccgggtatggtttggcaggacagagatgtgtacctgcaaggacccatttgggccaaaattcctcacacggacggcaactttcacccttctccgctgatgggagggtttggaatgaagcacccgcctcctcagatcctcatcaaaaacacacctgtacctgcggatcctccaacggccttcaacaaggacaagctgaactctttcatcacccagtattctactggccaagtcagcgtggagatcgagtgggagctgcagaaggaaaacagcaagcgctggaacccggagatccagtacacttccaactattacaagtctaataatgttgaatttgctgttaatactgaaggtgtatatagtgaaccccgccccattggcaccagatacctgactcgtaatctgtaattgcttgttaatcaataaaccgtttaattcgtttcagttgaactgcggcc

SEQ ID NO: 587 - DNA, 2601 bp, Artificial Sequence
  Synthetic polynucleotide
ccatcgacgtcagacgcggaagcttcgatcaactacgcggacaggtaccaaaacaaatgttctcgtcacgtgggcatgaatctgatgctgtttccctgcagacaatgcgagagactgaatcagaattcaaatatctgcttcactcacggtgtcaaagactgtttagagtgctttcccgtgtcagaatctcaacccgtttctgtcgtcaaaaaggcgtatcagaaactgtgctacattcatcacatcatgggaaaggtgccagacgcttgcactgcttgcgacctggtcaatgtggacttggatgactgtgtttctgaacaataaatgacttaaaccaggtatggctgccgatggttatcttccagattggctcgaggacaaccttagtgaaggaattcgcgagtggtgggctttgaaacctggagcccctcaacccaaggcaaatcaacaacatcaagacaacgctcgaggtcttgtgcttccgggttacaaataccttggacccggcaacggactcgacaagggggagccggtcaacgcagcagacgcggcggccctcgagcacgacaaggcctacgaccagcagctcaaggccggagacaacccgtacctcaagtacaaccacgccgacgccgagttccaggagcggctcaaagaagatacgtcttttgggggcaacctcgggcgagcagtcttccaggccaaaaagaggcttcttgaacctcttggtctggttgaggaagcggctaagacggctcctggaaagaagaggcctgtagagcagtctcctcaggaaccggactcctccgcgggtattggcaaatcgggtgcacagcccgctaaaaagagactcaatttcggtcagactggcgacacagagtcagtcccagaccctcaaccaatcggagaacctcccgcagccccctcaggtgtgggatctcttacaatggcttcaggtggtggcgcaccagtggcagacaataacgaaggtgccgatggagtgggtagttcctcgggaaattggcattgcgattcccaatggctgggggacagagtcatcaccaccagcacccgaacctgggccctgcccacctacaacaatcacctctacaagcaaatctccaacagcacatctggaggatcttcaaatgacaacgcctacttcggctacagcaccccctgggggtattttgacttcaacagattccactgccacttctcaccacgtgactggcagcgactcatcaacaacaactggggattccggcctaagcgactcaacttcaagctcttcaacattcaggtcaaagaggttacggacaacaatggagtcaagaccatcgccaataaccttaccagcacggtccaggtcttcacggactcagactatcagctcccgtacgtgctcgggtcggctcacgagggctgcctcccgccgttcccagcggacgttttcatgattcctcagtacgggtatctgacgcttaatgatggaagccaggccgtgggtcgttcgtccttttactgcctggaatatttcccgtcgcaaatgctaagaacgggtaacaacttccagttcagctacgagtttgagaacgtacctttccatagcagctacgctcacagccaaagcctggaccgactaatgaatccactcatcgaccaatacttgtactatctctcaaagactattaacggttctggacagaatcaacaaacgctaaaattcagtgtggccggacccagcaacatggctgtccagggaagaaactacatacctggacccagctaccgacaacaacgtgtctcaaccactgtgactcaaaacaacaacagcgaatttgcttggcctagagcttcttcttgggctctcaatggacgtaatagcttgatgaatcctggacctgctatggccagccacaaagaaggagaggaccgtttctttcctttgtctggatctttaatttttggcaaacaaggaactggaagagacaacgtggatgcggacaaagtcatgataaccaacgaagaagaaattaaaactactaacccggtagcaacggagtcctatggacaagtggccacaaaccaccagagtgcccaagcacaggcgcagaccggctgggttcaaaaccaaggaatacttccgggtatggtttggcaggacagagatgtgtacctgcaaggacccatttgggccaaaattcctcacacggacggcaactttcacccttctccgctgatgggagggtttggaatgaagcacccgcctcctcagatcctcatcaaaaacacacctgtacctgcggatcctccaacggccttcaacaaggacaagctgaactctttcatcacccagtattctactggccaagtcagcgtggagatcgagtgggagcggcagaaggaaaacagcaagcgctggaacccggagatccagtacacttccaactattacaagtctaataatgttgaatttgctgttaatactgaaggtgtatatagtgaaccccgccccattggcaccagatacctgactcgtaatctgtaattgcttgttaatcaataaaccgtttaattcgtttcagttgaactgcggcc

SEQ ID NO: 588 - DNA, 2601 bp, Artificial Sequence
  Synthetic polynucleotide
ccatcgacgtcagacgcggaagcttcgatcaactacgcggacaggtaccaaaacaaatgttctcgtcacgtgggcatgaatctgatgctgtttccctgcagacaatgcgagagactgaatcagaattcaaatatctgcttcactcacggtgtcaaagactgtttagagtgctttcccgtgtcagaatctcaacccgtttctgtcgtcaaaaaggcgtatcagaaactgtgctacattcatcacatcatgggaaaggtgccagacgcttgcactgcttgcgacctggtcaatgtggacttggatgactgtgtttctgaacaataaatgacttaaaccaggtatggctgccgatggttatcttccagattggctcgaggacaaccttagtgaaggaattcgcgagtggtgggctttgaaacctggagcccctcaacccaaggcaaatcaacaacatcaagacaacgctcgaggtcttgtgcttccgggttacaaataccttggacccggcaacggactcgacaagggggagccggtcaacgcagcagacgcggcggccctcgagcacgacaaggcctacgaccagcagctcaaggccggagacaacccgtacctcaagtacaaccacgccgacgccgagttccaggagcggctcaaagaagatacgtcttttgggggcaacctcgggcgagcagtcttccaggccaaaaagaggcttcttgaacctcttggtctggttgaggaagcggctaagacggctcctggaaagaagaggcctgtagagcagtctcctcaggaaccggactcctccgcgggtattggcaaatcgggtgcacagcccgctaaaaagagactcaatttcggtcagactggcgacacagagtcagtcccagaccctcaaccaatcggagaacctcccgcagccccctcaggtgtgggatctcttacaatggcttcaggtggtggcgcaccagtggcagacaataacgaaggtgccgatggagtgggtagttcctcgggaaattggcattgcgattcccaatggctgggggacagagtcatcaccaccagcacccgaacctgggccctgcccacctacaacaatcacctctacaagcaaatctccaacagcacatctggaggatcttcaaatgacaacgcctacttcggctacagcaccccctgggggtattttgacttcaacagattccactgccacttctcaccacgtgactggcagcgactcatcaacaacaactggggattccggcctaagcgactcaacttcaagctcttcaacattcaggtcaaagaggttacggacaacaatggagtcaagaccatcgccaataaccttaccagcacggtccaggtcttcgcggactcagactatcagctcccgtacgtgctcgggtcggctcacgagggctgcctcccgccgttcccagcggacgttttcatgattcctcagtacgggtatctgacgcttaatgatggaagccaggccgtgggtcgttcgtccttttactgcctggaatatttcccgtcgcaaatgctaagaacgggtaacaacttccagttcagctacgagtttgagaacgtacctttccatagcagctacgctcacagccaaagcctggaccgactaatgaatccactcatcgaccaatacttgtactatctctcaaagactattaacggttctggacagaatcaacaaacgctaaaattcagtgtggccggacccagcaacatggctgtccagggaagaaactacatacctggacccagctaccgacaacaacgtgtctcaaccactgtgactcaaaacaacaacagcgaatttgcttggcctagagcttcttcttgggctctcaatggacgtaatagcttgatgaatcctggacctgctatggccagccacaaagaaggagaggaccgtttctttcctttgtctggatctttaatttttggcaaacaaggaactggaagagacaacgtggatgcggacaaagtcatgataaccaacgaagaagaaattaaaactactaacccggtagcaacggagtcctatggacaagtggccacaaaccaccagagtgcccaagcacaggcgcagaccggctgggttcaaaaccaaggaatacttccgggtatggtttggcaggacagagatgtgtacctgcaaggacccatttgggccaaaattcctcacacggacggcaactttcacccttctccgctgatgggagggtttggaatgaagcacccgcctcctcagatcctcatcaaaaacacacctgtacctgcggatcctccaacggccttcaacaaggacaagctgaactctttcatcacccagtattctactggccaagtcagcgtggagatcgagtgggagctgcagaaggaaaacagcaagcgctggaacccggagatccagtacacttccaactattacaagtctaataatgttgaatttgctgttaatactgaaggtgtatatagtgaaccccgccccattggcaccagatacctgactcgtaatctgtaattgcttgttaatcaataaaccgtttaattcgtttcagttgaactgcggcc

SEQ ID NO: 589 - DNA, 2601 bp, Artificial Sequence
  Synthetic polynucleotide
ccatcgacgtcagacgcggaagcttcgatcaactacgcggacaggtaccaaaacaaatgttctcgtcacgtgggcatgaatctgatgctgtttccctgcagacaatgcgagagactgaatcagaattcaaatatctgcttcactcacggtgtcaaagactgtttagagtgctttcccgtgtcagaatctcaacccgtttctgtcgtcaaaaaggcgtatcagaaactgtgctacattcatcacatcatgggaaaggtgccagacgcttgcactgcttgcgacctggtcaatgtggacttggatgactgtgtttctgaacaataaatgacttaaaccaggtatggctgccgatggttatcttccagattggctcgaggacaaccttagtgaaggaattcgcgagtggtgggctttgaaacctggagcccctcaacccaaggcaaatcaacaacatcaagacaacgctcgaggtcttgtgcttccgggttacaaataccttggacccggcaacggactcgacaagggggagccggtcaacgcagcagacgcggcggccctcgagcacgacaaggcctacgaccagcagctcaaggccggagacaacccgtacctcaagtacaaccacgccgacgccgagttccaggagcggctcaaagaagatacgtcttttgggggcaacctcgggcgagcagtcttccaggccaaaaagaggcttcttgaacctcttggtctggttgaggaagcggctaagacggctcctggaaagaagaggcctgtagagcagtctcctcaggaaccggactcctccgcgggtattggcaaatcgggtgcacagcccgctaaaaagagactcaatttcggtcagactggcgacacagagtcagtcccagaccctcaaccaatcggagaacctcccgcagccccctcaggtgtgggatctcttacaatggcttcaggtggtggcgcaccagtggcagacaataacgaaggtgccgatggagtgggtagttcctcgggaaattggcattgcgattcccaatggctgggggacagagtcatcaccaccagcacccgaacctgggccctgcccacctacaacaatcacctctacaagcaaatctccaacagcacatctggaggatcttcaaatgacaacgcctacttcggctacagcaccccctgggggtattttgacttcaacagattccactgccacttctcaccacgtgactggcagcgactcatcaacaacaactggggattccggcctaagcgactcaacttcaagctcttcaacattcaggtcaaagaggttacggacaacaatggagtcaagaccatcgccaataaccttaccagcacggtccaggtcttcacggactcagactatcagctcccgtacgtgctcgggtcggctcacgagggctgcctcccgccgttcccagcggacgttttcatgattcctcagtacgggtatctgacgcttaatgatggaagccaggccgtgggtcgttcgtccttttactgcctggaatatttcccgtcgcaaatgctaagaacgggtaacaacttccagttcagctacgagtttgagaacgtacctttccatagcagctacgctcacagccaaagcctggaccgactaatgaatccactcatcgaccaatacttgtactatctctcaaagactattaacggttctggacagaatcaacaaacgctaaaattcagtgtggccggacccagcaacatggctgtccagggaagaaactacatacctggacccagctaccgacaacaacgtgtctcaaccactgtgactcaaaacaacaacagcgaaattgcttggcctagagcttcttcttgggctctcaatggacgtaatagcttgatgaatcctggacctgctatggccagccacaaagaaggagaggaccgtttctttcctttgtctggatctttaatttttggcaaacaaggaactggaagagacaacgtggatgcggacaaagtcatgataaccaacgaagaagaaattaaaactactaacccagtagcaacggagtcctatggacaagtggccacaaaccaccagagtgcccaagcacaggcgcagaccggctgggttcaaaaccaaggaatacttccgggtatggtttggcaggacagagatgtgtacctgcaaggacccatttgggccaaaattcctcacacggacggcaactttcacccttctccgctgatgggagggtttggaatgaagcacccgcctcctcagatcctcatcaaaaacacacctgtacctgcggatcctccaacggccttcaacaaggacaagctgaactctttcatcacccagtattctactggccaagtcagcgtggagatcgagtgggagctgcagaaggaaaacagcaagcgctggaacccggagatccagtacacttccaactattgcaagtctaataatgttgaatttgctgttaatactgaaggtgtatatagtgaaccccgccccattggcaccagatacctgactcgtaatctgtaattgcttgttaatcaataaaccgtttaattcgtttcagttgaactgcggcc

SEQ ID NO: 590 - DNA, 2601 bp, Artificial Sequence
  Synthetic polynucleotide
ccatcgacgtcagacgcggaagcttcgatcaactacgcggacaggtaccaaaacaaatgttctcgtcacgtgggcatgaatctgatgctgtttccctgcagacaatgcgagagactgaatcagaattcaaatatctgcttcactcacggtgtcaaagactgtttagagtgctttcccgtgtcagaatctcaacccgtttctgtcgtcaaaaaggcgtatcagaaactgtgctacattcatcacatcatgggaaaggtgccagacgcttgcactgcttgcgacctggtcaatgtggacttggatgtctgtgtttctgaacaataaatgacttaaaccaggtatggctgccgatggttatcttccagattggctcgaggacaaccttagtgaaggaattcgcgagtggtgggctttgaaacctggagcccctcaacccaaggcaaatcaacaacatcaagacaacgctcgaggtcttgtgcttccgggttacaaataccttggacccggcaacggactcgataagggggagccggtcaacgcagcagacgcggcggccctcgagcacgacaaggcctacgaccagcagctcaaggccggagacaacccgtacctcaagtacaaccacgccgacgccgagttccaggagcggctcaaagaagatacgtcttttgggggcaacctcgggcgagcagtcttccaggccaaaaagaggcttcttgaacctcttggtctggttgaggaagcggctaagacggctcctggaaagaagaggcctgtagagcagtctcctcaggaaccggactcctccgcgggtattggcaaatcgggtgcacagcccgctaaaaagagactcaatttcggtcagactggcgacacagagtcagtcccagaccctcaaccaatcggagaacctcccgcagccccctcaggtgtgggatctcttacaatggcttcaggtggtggcgcaccagtggcagacaataacgaaggtgccgatggagtgggtagttcctcgggaaattggcattgcgattcccaatggctgggggacagagtcatcaccaccagcacccgaacctgggccctgcccacctacaacaatcacctctacaagcaaatctccaacagcacatctggaggatcttcaaatgacaacgcctacttcggctacagcaccccctgggggtattttgacttcaacagattccactgccacttctcaccacgtgactggcagcgactcatcaacaacaactggggattccggcctaagcgactcaacttcaagctcttcaacattcaggtcaaagaggttacggacaacaatggagtcaagaccatcgccaataaccttaccagcacggtccaggtcttcacggactcagactatcagctcccgtacgtgctcgggtcggctcacgagggctgcctcccgccgttcccagcggacgttttcatgattcctcagtacgggtatctgacgcttaatgatggaagccaggccgtgggtcgttcgtccttttactgcctggaatatttcccgtcgcaaatgctaagaacgggtaacaacttccagttcagctacgagtttgagaacgtacctttccatagcagctacgctcacagccaaagcctggaccgactaatgaatccactcatcgaccaatacttgtactatctctcaaagactattaacggttctggacagaatcaacaaacgctaaaattcagtgtggccggacccagcaacatggctgtccagggaagaaactacatacctggacccagctaccgacaacaacgtgtctcaaccactgtgactcaaaacaacaacagcgaatttgcttggcctagagcttcttcttgggctctcaatggacgtaatagcttgatgaatcctggacctgctatggccagccacaaagaaggagaggaccgtttctttcctttgtctggatctttaatttttggcaaacaaggaactggaagagacaacgtggatgcggacaaagtcatgataaccaacgaagaagaaattaaaactactaacccggtagcaacggagtcctatggacaagtggccacaaaccaccagagtgcccaagcacaggcgcagaccggctgggttcaaaaccaaggaatacttccgggtatggtttggcaggacagagatgtgtacctgcaaggacccatttgggccaaaattcctcacacggacggcaactttcacccttctccgctgatgggagggtttggaatgaagcacccgcctcctcagatcctcatcaaaaacacacctgtacctgcggatcctccaacggccttcaacaaggacaagctgaactctttcatcacccagtattctactggccaagtcagcgtggagatcgagtgggagctgcagaaggaaaacagcaagcgctggaacccggagatccagtacacttccaactattacaagtctaataatgttgaatttgctgttaatactgaaggtgtatatagtgaaccccgccccattggcaccagatacctgactcgtaatctgtaattgcttgttaatcaataaaccgtttaattcgtttcagttgaactgcggcc

SEQ ID NO: 591 - protein, 736 aa, Artificial Sequence
  Synthetic polypeptide
MTADGYLPDWLEDNLSEGIREWWALKPGAPQPKANQQHQDNARGLVLPGYKYLGPGNGLDKGEPVNAADAAALEHDKAYDQQLKAGDNPYLKYNHADAEFQERLKEDTSFGGNLGRAVFQAKKRLLEPLGLVEEAAKTAPGKKRPVEQSPQEPDSSAGIGKSGAQPAKKRLNFGQTGDTESVPDPQPIGEPPAAPSGVGSLTMASGGGAPVADNNEGADGVGSSSGNWHCDSQWLGDRVITTSTRTWALPTYNNHLYKQISNSTSGGSSNDNAYFGYSTPWGYFDFNRFHCHFSPRDWQRLINNNWGFRPKQLNFKLFNIQVKEVTDNNGVKTIANNLTSTVQVFTDSDYQLPYVLGSAHEGCLPPFPADVFMIPQYGYLTLNDGSQAVGRSSFYCLEYFPSQMLRTGNNFQFSYEFENVPFHSSYAHSQSLDRLMNPLIDQYLYYLSKTINGSGQNQQTLKFSVAGPSNMAVQGRNYIPGPSYRQQRVSTTVTQNNNSEFAWPGASSWALNGRNSLMNPGPAMASHKEGEDRFFPLSGSLIFGKQGTGRDNVDADKVMITNEEEIKTTNPVATESYGQVATNHQSAQAQAQTGWVQNQGILPGMVWQDRDVYLQGPIWAKIPHTDGNFHPSPLMGGFGMKHPPPQILIKNTPVPADPPTAFNKDKLNSFITQYSTGQVSVEIEWELQKENSKRWNPEIQYTSNYYKSNNVEFAVNTEGVYSEPRPIGTRYLTRNL

SEQ ID NO: 592 - protein, 736 aa, Artificial Sequence
  Synthetic polypeptide
MAADGYLPDWLEDNLSEGIREWWALKPGAPQPKANQQHQDNARGLVLPGYKYLGPGNGLDKGEPVNAADAAALEHDKAYDQQLKAGDNPYLKYNHADAEFQERLKEDTSFGGNLGRAVFQAKKRLLEPLGLVEEAAKTAPGKKRPVEQSPQEPDSSAGIGKSGAQPAKKRLNFGQTGDTESVPDPQPIGEPPAAPSGVGSLTMASGGGAPVADNNEGADGVGSSSGNWHCDSQWLGDRVITTSTRTWALPTYNNHLYKQISNSTSGGSSNDNAYFGYSTPWGYFDFNRFHCHFSPRDWQRLINNNWGFRPKRLNFKLFNIQVKEVTDNNGVKTIANNLTSTVQVFTDSDYQLPYVLGSAHEGCLPPFPADVFMIPQYGYLTLNDGSQAVGRSSFYCLEYFPSQMLRTGNNFQFSYEFENVPFHSSYAHSQSLDRLMNPLIDQYLYYLSKTINGSGQNQQTLKFSVAGPSNMAVQGRNYIPGPSYRQQRVSTTVTQNNNSEFAWPGASSWALNGRNSLMNPGPAMASHKEGEDRFFPLSGSLIFGKQGTGRDNVDADKVMITNEEEIKTTNPVATESYGQVATNHQSAQAQAQTGWVQNQGILPGMVWQDRDVYLQGPIWAKIPHTGGNFHPSPLMGGFGMKHPPPQILIKNTPVPADPPTAFNKDKLNSFITQYSTGQVSVEIEWELQKENSKRWNPEIQYTSNYYKSNNVEFAVNTGGVYSEPRPIGTRYLTRNL

SEQ ID NO: 593 - protein, 736 aa, Artificial Sequence
  Synthetic polypeptide
MAADGYLPDWLEDNLSEGIREWWALKPGAPQPKANQQHQDNARGLVLPGYKYLGPGNGLDKGEPVNAADAAALEHDKAYDQQLKAGDNPYLKYNHADAEFQERLKEDTSFGGNLGRAVFQAKKRLLEPLGLVEEAAKTAPGKKRPVEQSPQEPDSSAGIDKSGAQPAKKRLNFGQTGDTESVPDPQPIGEPPAAPSGVGSLTMASGGGAPVADNNEGADGVGSSSGNWHCDSQWLGDRVITTSTRTWALPTYNNHLYKQISNSTSGGSSNDNAYFGYSTPWGYFDFNRFHCHFSPRDWQRLINNNWGFRPKRLNFKLFNIQVKEVTDNNGVKTIANNLTSTVQVFTDSDYQLPYVLGSAHEGCLPPFPADVFMIPQYGYLTLNDGSQAVGRSSFYCLEYFPSQMLRTGNNFQFSYEFENVPFHSSYAHSQSLDRLMNPLIDQYLYYLSKTINGSGQNQQTLKFSVAGPSNMAVQGRNYIPGPSYRQQRVSTTVTQNNNSEFAWPGASSWALNGRNSLMNPGPAMASHKEGEDRFFPLSGSLIFGKQGTGRDNVDADKVMITNEEEIKTTNPVATESYGQVATNHQSAQAQAQTGWVQNQGILPGMVWQDRDVYLQGPIWAKIPHTDGNFHPSPLMGGFGMKHPPPQILIKNTPVPADPPTAFNKDKLNSFITQYSTGQVSVEIEWELQKENSKRWNPEIQYTSNYYKSNNVEFAVNTEGVYSEPRPIGTRYLTRNL

SEQ ID NO: 594 - protein, 736 aa, Artificial Sequence
  Synthetic polypeptide
MAADGYLPDWLEDNLSEGIREWWALKPGAPQPKANQQHQDNARGLVLPGYKYLGPGNGLDKGEPVNAADAAALEHDKAYDQQLKAGDNPYLKYNHADAEFQERLKEDTSFGGNLGRAVLQAKKRLLEPLGLVEEAAKTAPGKKRPVEQSPQEPDSSAGIGKSGAQPAKKRLNFGQTGDTESVPDPQPIGEPPAAPSGVGSLTMASGGGAPVADNNEGADGVGSSSGNWHCDSQWLGDRVITTSTRTWALPTYNNHLYKQISNSTSGGSSNDNAYFGYSTPWGYFDFNRFHCHFSPRDWQRLINNNWGFRPKRLNFKLFNIQVKEVTDNNGVKTIANNLTSTVQVFTDSDYQLPYVLGSAHEGCLPPFPADVFMIPQYGYLTLNDGSQAVGRSSFYCLEYFPSQMLRTGNNFQFSYEFENVPFHSSYAHSQSLDRLMNPLIDQYLYYLSKTINGSGQNQQTLKFSVAGSSNMAVQGRNYIPGPSYRQQRVSTTVTQNNNSEFAWPGASSWALNGRNSLMNPGPAMASHKEGEDRFFPLSGSLIFGKQGTGRDNVDADKVMITNEEEIKTTNPVATESYGQVATNHQSAQAQAQTGWVQNQGILPGMVWQDRDVYLQGPIWAKIPHTDGNFHPSPLMGGFGMKHPPPQILIKNTPVPADPPTAFNKDKLNSFITQYSTGQVSVEIEWELQKENSKRWNPEIQYTSNYYKSNNVEFAVNTEGVYSEPRPIGTRYLTRNL

SEQ ID NO: 595 - protein, 736 aa, Artificial Sequence
  Synthetic polypeptide
MAADGYLPDWLEDNLSEGIREWWALKPGAPQPKANQQHQDNARGLVLPGYKYLGPGNGLDKGEPVNAADAAALEHDRAYDQQLKAGDNPYLKYNHADAEFQERLKEDTSFGGNLGRAVFQAKKRLLEPLGLVEEAAKTAPGKKRPVEQSPQEPDSSAGIGKSGAQPAKKRLNFGQTGDTESVPDPQPIGEPPAAPSGVGSLTMASGGGAPVADNNEGADGVGSSSGNWHCDSQWLGDRVITTSTRTWALPTYNNHLYKQISNSTSGGSSNDNAYFGYSTPWGYFDFNRFHCHFSPRDWQRLINNNWGFRPKRLNFKLFNIQVKEVTDNNGVKTIANNLTSTVQVFTDSDYQLPYVLGSAHEGCLPPFPADVFMIPQYGYLTLNDGSQAVGRSSFYCLEYFPSQMLRTGNNFQFSYEFENVPFHSSYAHSQSLDRLMNPLIDQYLYYLSKTINGSGQNQQTLKFSVAGPSNMAVQGRNYIPGPSYRQQRVSTTVTQNNNSEFAWPGASSWALNGRNSLMNPGPAMASHKEGEDRFFPLSGSLIFGKQGTGRDNVDADKVMITNEEEIKTTNPVATESYGQVATNHQSAQAQAQTGWVQNQGILPGMVWQDRDVYLQGPIWAKIPHTDGNFHPSPLMGGFGMKHPPPQILIKNTPVPADPPTAFNKDKLNSFITQYSTGQVSVEIEWELQKKNSKRWNPEIQYTSNYYKSNNVEFAVNTEGVYSEPRPIGTRYLTRNL

SEQ ID NO: 596 - protein, 736 aa, Artificial Sequence
  Synthetic polypeptide
MAADGYLPDWLEDNLSEGIREWWALKPGAPQPKANQQHQDNARGLVLPGYKYLGPGNGLDKGEPVNAADAAALEHDKAYDQQLKAGDNPYLKYNHADAEFQERLKEDTSFGGNLGRAVFQAKKRLLEPLGLVEEAAKTAPGKKRPVEQSPQEPDSSAGIGKSGAQPAKKRLNFGQTGDTESVPDPQPIGEPPAAPSGVGSLTMASGGGAPVADNNEGADGVGSSSGNWHCDSQWLGDRVITTSTRTWALPTYNNHLYKQISNSTSGGSSNDNAYFGYSTPWGYFDFNRFHCHFSPRDWQRLINNNWGFRPKRLNFKLFNIQVKEVTDNNGVKTIANNLTSTVQVFTDSDYQLPYVLGSAHEGCLPPFPADVFMIPQYGYLTLNDGSQAVGRSSFYCLEYFPSQMLRTGNNFQFSYEFENVPFHSSYAHSQSLDRLMNPLIDQYLYYLSKTINGSGQNQQTLKFSVAGPSNMAVQGRNYIPGPSYRQQRVSTTVTQNNNSEFAWPGASSWALNGRNSLMNPGPAMASHKEGEDRFFPLSGSLIFGKQGTGRDNVDADKVMITNEEEIKTTNPVATESYGQVATNHQSAQARAQTGWVQNQGILPGMVWQDRDVYLQGPIWAKIPHTDGNFHPSPLMGGFGMKHPPPQILIKNTPVPADPPTAFNKDKLNSFITQYSTGQVSVEIEWELQKENSKRWNPEIQYTSNYYKSNNVEFAVNTEGVYSEPRPIGTRYLTRNL

SEQ ID NO: 597 - protein, 736 aa, Artificial Sequence
  Synthetic polypeptide
MAADGYLPDWLEDNLSEGIREWWALKPGAPQPKANQQHQDNARGLVLPGYKYLGPGNGLDKGEPVNAVDAAALEHDKAYDQQLKAGDNPYLKYNHADAEFQERLKEDTSFGGNLGRAVFQAKKRLLEPLGLVEEAAKTAPGKKRPVEQSPQEPDSSAGIGKSGAQPAKKRLNFGQTGDTESVPDPQPIGEPPAAPSGVGSLTMASGGGAPVADNNEGADGVGSSSGNWHCDSQWLGDRVITTSTRTWALPTYNNHLYKQISNSTSGGSSNDNAYFGYSTPWGYFDFNRFHCHFSPRDWQRLINNNWGFRPKRLNFKLFNIQVKEVTDNNGVKTIANNLTSTVQVFTDSDYQLPYVLGSAHEGCLPPFPADVFMIPQYGYLTLNDGSQAVGRSSFYCLEYFPSQMLRTGNNFQFSYEFENVPFHSSYAHSQSLDRLMNPLIDQYLYYLSKTINGSGQNQQTLKFSVAGPSNMAVQGRNYIPGPSYRQQRVSTTVTQNNNSEFAWPGASSWALNGRNSLMNPGPAMASHKEGEDRFFPLSGSLIFGKQGTGRDNVDADKVMITNEEEIKTTNPVATESYGQVATNHQSAQAQAQTGWVQNQGILPGMVWQDRDVYLQGPIWAKIPHTDGNFHPSPLMGGFGMKHPPPQILIKNTPVPADPPTAFNKDKLNSFITQYSTGQVSVEIEWELQKENSKRWNPEIQYTSNYYKSNNVEFAVNTEGVYSEPRPIGTRYLTRNL

SEQ ID NO: 598 - protein, 736 aa, Artificial Sequence
  Synthetic polypeptide
MAADGYLPDWLEDNLSEGIREWWALKPGAPQPKANQQHQDNARGLVLPGYKYLGPGNGLDKGEPVNAADAAALEHDKAYDQQLKAGDNPYLKYNHADAEFQERLKEDTSFGGNLGRAVFQAKKRLLEPLGLVEEAAKTAPGKKRPVEQSPREPDSSAGIGKSGAQPAKKRLNFGQTGDTESVPDPQPIGEPPAAPSGVGSLTMASGGGAPVADNNEGADGVGSSSGNWHCDSQWLGDRVITTSTRTWALPTYNNHLYKQISNSTSGGSSNDNAYFGYSTPWGYFDFNRFHCHFSPRDWQRLINNNWGFRPKRLNFKLFNIQVKEVTDNNGVKTIANNLTSTVQVFTDSDYQLPYVLGSAHEGCLPPFPADVFMIPQYGYLTLNDGSQAVGRSSFYCLEYFPSQMLRTGNNFQFSYEFENVPFHSSYAHSQSLDRLMNPLIDQYLYYLSKTINGSGQNQQTLKFSVAGPSNMAVQGRNYIPGPSYRQQRVSTTVTQNNNSEFAWPGASSWALNGRNSLMNPGPAMASHKEGEDRFFPLSGSLIFGKQGTGRDNVDADKVMITNEEEIKTTNPVATESYGQVATNHQSAQAQAQTGWVQNQGILPGMVWQDRDVYLQGPIWAKIPHTDGNFHPSPLMGGFGMKHPPPQILIKNTPVPADPPTAFNKDKLNSFITQYSTGQVSVEIEWELQKENSKRWNPEIQYTSNYYKSNNVEFAVNTEGVYSEPRPIGTRYLTRNL

SEQ ID NO: 599 - protein, 736 aa, Artificial Sequence
  Synthetic polypeptide
MAADGYLPDWLEDNLSEGIREWWALKPGAPQPKANQQHQDNARGLVLPGYKYLGPGNGLDKGEPVNAADAAALEHDKAYDQQLKAGDNPYLKYNHADAEFQERLKEDTSFGGNLGRAVFQAKKRLLEPLGLVEEAAKTAPGKKRPVEQSPQEPDSSAGIGKSGAQPAKKRLNFGQTGDTESVPDPQPIGEPPAAPSGVGSLTMASCGGAPVADNNEGADGVGSSSGNWHCDSQWLGDRVITTSTRTWALPTYNNHLYKQISNSTSGGSSNDNAYFGYSTPWGYFDFNRFHCHFSPRDWQRLINNNWGFRPKRLNFKLFNIQVKEVTDNNGVKTIANNLTSTVQVFTDSDYQLPYVLGSAHEGCLPPFPADVFMIPQYGYLTLNDGSQAVGRSSFYCLEYFPSQMLRTGNNFQFSYEFENVPFHSSYAHSQSLDRLMNPLIDQYLYYLSKTINGSGQNQQTLKFSVAGPSNMAVQGRNYIPGPSYRQQRVSTTVTQNNNSEFAWPGASSWALNGRNSLMNPGPAMASHKEGEDRFFPLSGSLIFGKQGTGRDNVDADKVMITNEEEIKTTNPVATESYGQVATNHQSAQAQAQTGWVQNQGILPGMVWQDRDVYLQGPIWAKIPHTDGNFHPSPLMGGFGMKHPPPQILIKNTPVPADPPTAFNKDKLNSFITQYSTGQVSVEIEWELQKENSKRWNPEIQYTSNYYKSNNVEFAVNTEGVYSEPRPIGTRYLTRNL

SEQ ID NO: 600 - protein, 736 aa, Artificial Sequence
  Synthetic polypeptide
MAADGYLPDWLEDNLSEGIREWWALKPGAPQPKANQQHQDNARGLVLPGYKYLGPGNGLDKGEPINAADAAALEHDKAYDQQLKAGDNPYLKYNHADAEFQERLKEDTSFGGNLGRAVFQAKKRLLEPLGLVEEAAKTAPGKKRPVEQSPQEPDSSAGIGKSGAQPAKKRLNFGQTGDTESVPDPQPIGEPPAAPSGVGSLTMASGGGAPVADNNEGADGVGSSSGNWHCDSQWLGDRVITTSTRTWALPTYNNHLYKQISNSTSGGSSNDNAYFGYSTPWGYFDFNRFHCHFSPRDWQRLINNNWGFRPKRLNFKLFNIQVKEVTDNNGVKTIANNLTSTVQVFTDSDYQLPYVLGSAHEGCLPPFPADVFMIPQYGYLTLNDGSQAVGRSSFYCLEYFPSQMLRTGNNFQFSYEFENVPFHSSYAHSQSLDRLMNPLIDQYLYYLSKTINGSGQNQQTLKFSVAGPSNMAVQGRNYIPGPSYRQQRVSTTVTQNNNSEFAWPGASSWALNGRNSLMNPGPAMASHKEGEDRFFPLSGSLIFGKQGTGRDNVDADKVMITNEEEIKTTNPVATESYGQVATNHQSAQAQAQTGWVQNQGILPGMVWQDRDVYLQGPIWAKIPHTYGNFHPSPLMGGFGMKHPPPQILIKNTPVPADPPTAFNKDKLNSFITQYSTGQVSVEIEWELQKENSKRWNPEIQYTSNYYKSNNVEFAVNTEGVYSEPRPIGTRYLTRNL

SEQ ID NO: 601 - protein, 736 aa, Artificial Sequence
  Synthetic polypeptide
MAADGYLPDWLEDNLSEGIREWWALKPGAPQPKANQQHQDNARGLVLPGYKYLGPGNGLDKGEPVNAADAAALEHDKAYDQQLKAGDNPYLKYNHADAEFQERLKEDTSFGGNLGRAVFQAKKRLLEPLGLVEEAAKTAPGKKRPVEQSPQEPDSSAGIGKSGAQPAKKRLNFGQTGDTESVPDPQPIGEPPAAPSGVGSLTMASGGGAPVADNNEGADGVGSSSGNWHCDSQWLGDRVITTSTRTWALPTYNNHLYKQISNSTSGGSSNDNAYFGYSTPWGYFDFNRFHCHFSPHDWQRLINNNWGFRPKRLNFKLFNIQVKEVTDNNGVKTIANNLTSTVQVFTDSDYQLPYVLGSAHEGCLPPFPADVFMIPQYGYLTLNDGSQAVGRSSFYCLEYFPSQMLRTGNNFQFSYEFENVPFHSSYAHSQSLDRLMNPLIDQYLYYLSKTINGSGQNQQTLKFNVAGPSNMAVQGRNYIPGPSYRQQRVSTTVTQNNNSEFAWPRASSWALNGRNSLMNPGPAMASHKEGEDRFFPLSGSLIFGKQGTGRDNVDADKVMITNEEEIKTTNPVATESYGQVATNHQSAQAQAQTGWVQNQGILPGMVWQDRDVYLQGPIWAKIPHTDGNFHPSPLMGGFGMKHPPPQILIKNTPVPADPPTAFNKDKLNSFITQYSTGQVSMEIEWELQKENSKRWNPEIQYTSNYYKSNNVEFAVNTEGVYSEPRPIGTRYLTRNL

SEQ ID NO: 602 - protein, 736 aa, Artificial Sequence
  Synthetic polypeptide
MAADGYLPDWLEDNLSEGIREWWALKPGAPQPKANQQHQDNARGLVLPGYKYLGPGNGLDKGEPVNAADAAALEHDKAYDQQLKAGDNPYLKYNHADAEFQERLKEDTSFGGNLGRAVFQAKKRLLEPLGLVEEAAKTAPGKKRPVEQSPQEPDSSAGIGKSGAQPAKKRLNFGQTGDTESVPDPQPIGEPPAAPSGVGSLTMASGGGAPVADNNEGADGVGSSSGNWHCDSQWLGDRVITTSTRTWALPTYNNHLYKQISNSTSGGSSNDNAYFGYSTPWGYFDFNRFHCHFSPRDWQRLINNNWGFRPKRLNFKLFNIQVKEVTDNNGVKTIANNLTSTVQVFTDSDYQLPYVLGSAHEGCLPPFPADVFMIPQYGYLTLNDGSQAVGRSSFYCLEYFPSQMLRTGNNFQFSYEFENVPFHSSYAHSQSLDRLMNPLIDQYLYYLSKTINGSGQNQQTLKFSVAGPSNMAVQGRNYIPGPSYRQQRVSTTVTQNNNSEFAWPRASSWALNGRNSLMNPGPAMASHKEGEDRFFPLSGSLIFGKQGTGRDNVDADKVMITNEEEIKTTNPVATESYGQVATNHQSAQAQAQTGWVQNQGILPGMVWQDRDVYLQGPIWAKIPHTDGNFHPSPLMGGFGMKHPPPQILIKNTPVPADPPTAFNKDKLNSFITQYSTGQVSVEIEWELQKENSKRWNPEIQYTSNYYKSNNVEFAVNTEGVYSEPRPIGTRYLTRNL

SEQ ID NO: 603 - protein, 736 aa, Artificial Sequence
  Synthetic polypeptide
MAADGYLPDWLEDNLSEGIREWWALKPGAPQPKANQQHQDNARGLVLPGYKYLGPGNGLDKGEPVNAADAAALEHDKAYDQQLKAGDNPYLKYNHADAEFQERLKEDTSFGGNLGRAVFQAKKRLLEPLGLVEEAAKTAPGKKRPVEQSPQEPDSSAGIGKSGAQPAKKRLNFGQTGDTESVPDPQPIGEPPAAPSGVGSLTMASGGGAPVADNNEGADGVGSSSGNWHCDSQWLGDRVITTSTRTWALPTYNNHLYKQISNSTSGGSSNDNAYFGYSTPWGYFDFNRFHCHFSPRDWQRLINNNWGFRPKRLNFKLFNIQVKEVTDNNGVKTIANNLTSTVQVFTDSDYQLPYVLGSAHEGCLPPFPADVFMIPQYGYLTLNDGSQAVGRSSFYCLEYFPSQMLRTGNNFQFSYEFENVPFHSSYAHSQSLDRLMNPLIDQYLYYLSKTINGSGQNQQTLKFSVAGPSNMAVQGRNYIPGPSYRQQRVSTTVTQNNNSEFAWPRASSWALNGRNSLMNPGPAMASHKEGEDRFFPLSGSLIFGKQGTGRDNVDADKVMITNEEEIKTTNPVATESYGQVATNHQSAQAQAQTGWVQNQGILPGMVWQDRDVYLQGPIWAKIPHTDGNFHPSPLMGGFGMKHPPPQILIKNTPVPADPPTAFNKDKLNSFITQYSTGQVSVEIEWERQKENSKRWNPEIQYTSNYYKSNNVEFAVNTEGVYSEPRPIGTRYLTRNL

SEQ ID NO: 604 - protein, 736 aa, Artificial Sequence
  Synthetic polypeptide
MAADGYLPDWLEDNLSEGIREWWALKPGAPQPKANQQHQDNARGLVLPGYKYLGPGNGLDKGEPVNAADAAALEHDKAYDQQLKAGDNPYLKYNHADAEFQERLKEDTSFGGNLGRAVFQAKKRLLEPLGLVEEAAKTAPGKKRPVEQSPQEPDSSAGIGKSGAQPAKKRLNFGQTGDTESVPDPQPIGEPPAAPSGVGSLTMASGGGAPVADNNEGADGVGSSSGNWHCDSQWLGDRVITTSTRTWALPTYNNHLYKQISNSTSGGSSNDNAYFGYSTPWGYFDFNRFHCHFSPRDWQRLINNNWGFRPKRLNFKLFNIQVKEVTDNNGVKTIANNLTSTVQVFADSDYQLPYVLGSAHEGCLPPFPADVFMIPQYGYLTLNDGSQAVGRSSFYCLEYFPSQMLRTGNNFQFSYEFENVPFHSSYAHSQSLDRLMNPLIDQYLYYLSKTINGSGQNQQTLKFSVAGPSNMAVQGRNYIPGPSYRQQRVSTTVTQNNNSEFAWPRASSWALNGRNSLMNPGPAMASHKEGEDRFFPLSGSLIFGKQGTGRDNVDADKVMITNEEEIKTTNPVATESYGQVATNHQSAQAQAQTGWVQNQGILPGMVWQDRDVYLQGPIWAKIPHTDGNFHPSPLMGGFGMKHPPPQILIKNTPVPADPPTAFNKDKLNSFITQYSTGQVSVEIEWELQKENSKRWNPEIQYTSNYYKSNNVEFAVNTEGVYSEPRPIGTRYLTRNL

SEQ ID NO: 605 - protein, 736 aa, Artificial Sequence
  Synthetic polypeptide
MAADGYLPDWLEDNLSEGIREWWALKPGAPQPKANQQHQDNARGLVLPGYKYLGPGNGLDKGEPVNAADAAALEHDKAYDQQLKAGDNPYLKYNHADAEFQERLKEDTSFGGNLGRAVFQAKKRLLEPLGLVEEAAKTAPGKKRPVEQSPQEPDSSAGIGKSGAQPAKKRLNFGQTGDTESVPDPQPIGEPPAAPSGVGSLTMASGGGAPVADNNEGADGVGSSSGNWHCDSQWLGDRVITTSTRTWALPTYNNHLYKQISNSTSGGSSNDNAYFGYSTPWGYFDFNRFHCHFSPRDWQRLINNNWGFRPKRLNFKLFNIQVKEVTDNNGVKTIANNLTSTVQVFTDSDYQLPYVLGSAHEGCLPPFPADVFMIPQYGYLTLNDGSQAVGRSSFYCLEYFPSQMLRTGNNFQFSYEFENVPFHSSYAHSQSLDRLMNPLIDQYLYYLSKTINGSGQNQQTLKFSVAGPSNMAVQGRNYIPGPSYRQQRVSTTVTQNNNSEIAWPRASSWALNGRNSLMNPGPAMASHKEGEDRFFPLSGSLIFGKQGTGRDNVDADKVMITNEEEIKTTNPVATESYGQVATNHQSAQAQAQTGWVQNQGILPGMVWQDRDVYLQGPIWAKIPHTDGNFHPSPLMGGFGMKHPPPQILIKNTPVPADPPTAFNKDKLNSFITQYSTGQVSVEIEWELQKENSKRWNPEIQYTSNYCKSNNVEFAVNTEGVYSEPRPIGTRYLTRNL

SEQ ID NO: 606 - protein, 736 aa, Artificial Sequence; identical to SEQ ID NO: 602
  Synthetic polypeptide

SEQ ID NO: 607 - DNA, 2208 bp, Artificial Sequence
  Synthetic polynucleotide
atggctgccgatggttatcttccagattggctcgaggacaaccttagtgaaggaattcgcgagtggtgggctttgaaacctggagcccctcaacccaaggcaaatcaacaacatcaagacaacgctcgaggtcttgtgcttccgggttacaaataccttggacccggcaacggactcgacaagggggagccggtcaacgcagcagacgcggcggccctcgagcacgacaaggcctacgaccagcagctcaaggccggagacaacccgtacctcaagtacaaccacgccgacgccgagttccaggagcggctcaaagaagatacgtcttttgggggcaacctcgggcgagcagtcttccaggccaaaaagaggcttcttgaacctcttggtctggttgaggaagcggctaagacggctcctggaaagaagaggcctgtagagcagtctcctcaggaaccggactcctccgcgggtattggcaaatcgggtgcacagcccgctaaaaagagactcaatttcggtcagactggcgacacagagtcagtcccagaccctcaaccaatcggagaacctcccgcagccccctcaggtgtgggatctcttacaatggcttcaggtggtggcgcaccagtggcagacaataacgaaggtgccgatggagtgggtagttcctcgggaaattggcattgcgattcccaatggctgggggacagagtcatcaccaccagcacccgaacctgggccctgcccacctacaacaatcacctctacaagcaaatctccaacagcacatctggaggatcttcaaatgacaacgcctacttcggctacagcaccccctgggggtattttgacttcaacagattccactgccacttctcaccacgtgactggcagcgactcatcaacaacaactggggattccggcctaagcgactcaacttcaagctcttcaacattcaggtcaaagaggttacggacaacaatggagtcaagaccatcgccaataaccttaccagcacggtccaggtcttcacggactcagactatcagctcccgtacgtgctcgggtcggctcacgagggctgcctcccgccgttcccagcggacgttttcatgattcctcagtacgggtatctgacgcttaatgatggaagccaggccgtgggtcgttcgtccttttactgcctggaatatttcccgtcgcaaatgctaagaacgggtaacaacttccagttcggctacgagtttgagaacgtacctttccatagcagctacgctcacagccaaagcctggaccgactaatgaatccactcatcgaccaatacttgtactatctctcaaagactattaacggttctggacagaatcaacaaacgctaaaattcagtgtggccggacccagcaacatggctgtccagggaagaaactacatacctggacccagctaccgacaacaacgtgtctcaaccactgtgactcaaaacaacaacagcgaatttgcttggcctggagcttcttcttgggctctcaatggacgtaatagcttgatgaatcctggacctgctatggccagccacaaagaaggagaggaccgtttctttcctttgtctggatctttaatttttggcaaacaaggaactggaagagacaacgtggatgcggacaaagtcatgataaccaacgaagaagaaattaaaactactaacccggtagcaacggagtcctatggacaagtggccacaaaccaccagagtgcccaagcacaggcgcagaccggctgggttcaaaaccaaggaatacttccgggtatggtttggcaggacagagatgtgtacctgcaaggacccatttgggccaaaattcctcacacggacggcaactttcacccttctccgctgatgggagggtttggaatgaagcacccgcctcctcagatcctcatcaaaaacacacctgtacctgcggatcctccaacggccttcaacaaggacaagctgaactctttcatcacccagtattctactggccaagtcagcgtggagatcgagtgggagctgcagaaggaaaacagcaagcgctgggacccggagatccagtacacttccaactattacaagtctaataatgttgaatttgctgttaatactgaaggtgtatatagtgaaccccgccccattggcaccagatacctgactcgtaatctg

SEQ ID NO: 608 - DNA, 2208 bp, Artificial Sequence
  Synthetic polynucleotide
atggctgccgatggttatcttccagattggctcgaggacaaccttagtgaaggaattcgcgagtggtgggctttgaaacctggagcccctcaacccaaggcaaatcaacaacatcaagacaacgctcgaggtcttgtgcttccgggttacaaataccttggacccggcaacggactcgacaagggggagccggtcaacgcagcagacgcggcggccctcgagcacgacaaggcctacgaccagcagctcaaggccggagacaacccgtacctcaagtacaaccacgccgacgccgagttccaggagcggctcaaagaagatacgtcttttgggggcaacctcgggcgagcagtcttccaggccaaaaagaggcttcttgaacctcttggtctggttgaggaagcggctaagacggctcctggaaagaagaggcctgtagagcagtctcctcaggaaccggactcctccgcgggtattggcaaatcgggtgcacagcccgctaaaaagagactcaatttcggtcagactggcgacacagagtcagtcccagaccctcaaccaatcggagaacctcccgcagccccctcaggtgtgggatctcttacaatggcttcaggtggtggcgcaccagtggcagacaataacgaaggtgccgatggagtgggtagttcctcgggaaattggcattgcgattcccaatggctgggggacagagtcatcaccaccagcacccgaacctgggccctgcccacctacaacaatcacctctacaagcaaatctccaacagcacatctggaggatcttcaaatgacaacgcctacttcggctacagcaccccctgggggtattttgacttcaacagattccactgccgcttctcaccacgtgactggcagcgactcatcaacaacaactggggattccggcctaagcgactcaacttcaagctcttcaacattcaggtcaaagaggttacggacaacaatggagtcaagaccatcgccaataaccttaccagcacggtccaggtcttcacggactcagactatcagctcccgtacgtgctcgggtcggctcacgagggctgcctcccgccgttcccagcggacgttttcatgattcctcagtacgggtatctgacgcttaatgatggaagccaggccgtgggtcgttcgtccttttactgcctggaatatttcccgtcgcaaatgctaagaacgggtaacaacttccagttcagctacgagtttgagaacgtacctttccatagcagctacgctcacagccaaagcctggaccgactaatgaatccactcatcgaccaatacttgtactatctctcaaagactattaacggttctggacagaatcaacaaacgctaaaattcagtgtggccggacccagcaacatggctgtccagggaagaaactacatacctggacccagctaccgacaacaacgtgtctcaaccactgtgactcaaaacaacaacagcgaatttgcttggcctggagcttcttcttgggctctcaatggacgtaatagcttgatgaatcctggacctgctatggccagccacaaagaaggagaggaccgtttctttcctttgtctggatctttaatttttggcaaacaaggaactggaagagacaacgtggatgcggacaaagtcatgataaccaacgaagaagaaattaaaactactaacccggtagcaacggagtcctatggacaagtggccacaaaccaccagagtgcccaagcacaggcgcagaccggctgggttcaaaaccaaggaatacttccgggtatggtttggcaggacagagatgtgtacctgcaaggacccatttgggccaaaattcctcacacggacggcaactttcacccttctccgctgatgggagggtttggaatgaagcacccgcctcctcagatcctcatcaaaaacgcccctgtacctgcggatcctccaacggccttcaacaaggacaagctgaactctttcatcacccagtattctactggccaagtcagcgtggagatcgagtgggagctgcagaaggaaaacagcaagcgctggaacccggagatccagtacacttccaactattacaagtctaataatgttgaatttgctgttaatactgaaggtgtatatagtgaaccccgccccattggcaccagatacctgactcgtaatctg

SEQ ID NO: 609 - DNA, 2208 bp, Artificial Sequence
  Synthetic polynucleotide
atggctgccgatggttatcttccagattggctcgaggacaaccttagtgaaggaattcgcgagtggtgggctttgaaacctggagcccctcaacccaaggcaaatcaacaacatcaagacaacgctcgaggtcttgtgcttccgggttacaaataccttggacccggcaacggactcgacaagggggagccggtcagcgcagcagacgcggcggccctcgagcacgacaaggcctacgaccagcagctcaaggccggagacaacccgtacctcaagtacaaccacgccgacgccgagttccaggagcggctcaaagaagatacgtcttttgggggcaacctcgggcgagcagtcttccaggccaaaaagaggcttcttgaacctcttggtctggttgaggaagcggctaagacggctcctggaaagaagaggcctgtagagcagtctcctcaggaaccggactcctccgcgggtattggcaaatcgggtgcacagcccgctaaaaagagactcaatttcggtcagactggcgacacagagtcagtcccagaccctcaaccaatcggagaacctcccgcagccccctcaggtgtgggatctcttacaatggcttcaggtggtggcgcaccagtggcagacaataacgaaggtgccgatggagtgggtagttcctcgggaaattggcattgcgattcccaatggctgggggacagagtcatcaccaccagcacccgaacctgggccctgcccacctacaacaatcacctctacaagcaaatctccaacagcacatctggaggatcttcaaatgacaacgcctacttcggctacagcaccccctgggggtattttgacttcaacagattccactgccacttctcaccgcgtgactggcagcgactcatcaacaacaactggggattccggcctaagcgactcaacttcaagctcttcaacattcaggtcaaagaggttacggacaacaatggagtcaagaccatcgccaataaccttaccagcacggtccaggtcttcacggactcagactatcagctcccgtacgtgctcgggtcggctcacgagggctgcctcccgccgttcccagcggacgttttcatgattcctcagtacgggtatctgacgcttaatgatggaagccaggccgtgggtcgttcgtccttttactgcctggaatatttcccgtcgcaaatgctaagaacgggtaacaacttccagttcagctacgagtttgagaacgtacctttccatagcagctacgctcacagccaaagcctggaccgactaatgaatccactcatcgaccaatacttgtactatctctcaaagactattaacggttctggacagaatcaacaaacgctaaaattcagtgtggccggacccagcaacatggctgtccagggaagaaactacatacctggacccagctaccgacaacaacgtgtctcaaccactgtgactcaaaacaacaacagcgaatttgcttggcctggagcttcttcttgggctctcaatggacgtaatagcttgatgaatcctggacctgctatggccagccacaaagaaggagaggaccgtttctttcctttgtctggatctttaatttttggcaaacaaggaactggaagagacaacgtggatgcggacaaagtcatgataaccaacgaagaagaaattaaaactactaacccggtagcaacggagtcctatggacaagtggccacaaaccaccagagtgcccaagcacaggcgcagaccggctgggttcaaaaccaaggaatacttccgggtatggtttggcaggacagagatgtgtacctgcaaggacccatttgggccaaaattcctcacacggacggcaactttcacccttctccgctgatgggagggtttggaatgaagcacccgcctcctcagatcctcatcaaaaacacacctgtacctgcggatcctccaacggccttcaacaaggacaagctgaactctttcatcacccagtattctactggccaagtcagcgtggagatcgagtgggagctgcagaaggaaaacagcaagcgctggaacccggagatccagtacacttccaactattacaagtctaataatgttgaatttgctgttaatactgaaggtgtatatagtgaaccccgccccattggcaccagatacctgactcgtaatctg

SEQ ID NO: 610 - DNA, 2208 bp, Artificial Sequence
  Synthetic polynucleotide
atggctgccgatggttatcttccagattggctcgaggacaaccttagtgaaggaattcgcgagtggtgggctttgaaacctggagcccctcaacccaaggcaaatcaacaacatcaagacaacgctcgaggtcttgtgcttccgggttacaaataccttggacccggcaacggactcgacaagggggagccggtcaacgcagcagacgcggcggccctcgagcacgacaaggcctacgaccagcagctcaaggccggagacaacccgtacctcaagtacaaccacgccgacgccgagttccaggagcggctcaaagaagatacgtcttttgggggcaacctcgggcgagcagtcttccaggccaaaaagaggcttcttgaacctcttggtctggttgaggaagcggctaagacggctcctggaaagaagaggcctgtagagcagtctcctcaggaaccggactcctccgcgggtattggcaaatcgggtgcacagcccgctaaaaagagactcaatttcggtcagactggcgacacagagtcagtcccagaccctcaaccaatcggagaacctcccgcagccccctcaggtgtgggatctcttacaatggcttcaggtggtggcgcaccagtggcagacaataacgaaggtgccgatggagtgggtagttcctcgggaaattggcattgcgattcccaatggctgggggacagagtcatcaccaccagcacccgaacctgggccctgcccacctacaacaatcacctctacaagcaaatctccaacagcacatctggaggatcttcaaatgacaacgcctacttcggctacagcaccccctgggggtattttgacttcaacagattccactgccacttctcaccacgtgactggcagcgactcatcaacaacaactggggattccggcctaagcgactcaacttcaagctcttcaacattcaggtcaaagaggttacggacaacaatggagtcaagaccatcgccaataaccttaccagcacggtccaggtcttcacggactcagactatcagctcccgtacgtgctcgggtcggctcacgagggctgcctcccgccgttcccagcggacgttttcatgattcctcagtacgggtatctgacgcttaatgatggaagccaggccgtgggtcgttcgtccttttactgcctggaatatttcccgtcgcaaatgctaagaacgggtaacaacttccagttcagctacgagtttgagaacgtacctttccatagcagctacgctcacagccaaagcctggaccgactaatgaatccactcatcgaccaatacttgtactatctctcaaagactattaacggttctggacagaatcaacaaacgctaaaattcagtgtggccggacccagcaacacggctgtccagggaagaaactacatacctggacccagctaccgacaacaacgtgtctcaaccactgtgactcaaaacaacaacagcgaatttgcttggcctggagcttcttcttgggctctcaatggacgtaatagcttgatgaatcctggacctgctatggccagccacaaagaaggagaggaccgtttctttcctttgtctggatctttaatttttggcaaacaaggaactggaagagacaacgtggatgcggacaaagtcatgataaccaacgaagaagaaattaaaactactaacccggtagcaacggagtcctatggacaagtggccacaaaccaccagagtgcccaagcacaggcgcagaccggctgggttcaaaaccaaggaatacttccgggtatggtttggcaggacagagatgtgtacctgcaaggacccatttgggccaaaattcctcacacggacggcaactttcacccttctccgctgatgggagggtttggaatgaagcacccgcctcctcagatcctcatcaaaaacacacctgtacctgcggatcctccaacggccttcaacaaggacaagctgaactctttcatcacccagtattctactggccaagtcagcgtggagatcgagtgggagctgcagaaggaaaacagcaagcgctggaacccggagatccagtacacttccaactattacaagtctaataatgttgaatttgctgttaatactgaaggtgtatatagtgaaccccgccccattggcaccagatacctgactcgtaatctg

SEQ ID NO: 611 - DNA, 2208 bp, Artificial Sequence
  Synthetic polynucleotide
atggctgccgatggttatcttccagattggctcgaggacaaccttagtgaaggaattcgcgagtggtgggctttgaaacctggagcccctcaacccaaggcaaatcaacaacatcaagacaacgctcgaggtcttgtgcttccgggttacaaataccttggacccggcaacggactcgacaagggggagccggtcaacgcagcagacgcggcggccctcgagcacgacaaggcctacgaccagcagctcaaggccggagacaacccgtacctcaagtacaaccacgccgacgccgagttccaggagcggctcaaagaagatacgtcttttgggggcaacctcgggcgagcagtcttccaggccaaaaagaggcttcttgaacctcttggtctggttgaggaagcggctaagacggctcctggaaagaagaggcctgtagagcagtctcctcaggaaccggactcctccgcgggtattggcaaatcgggtgcacagcccgctaaaaagagactcaatttcggtcagactggcgacacagagtcagtcccagaccctcaaccaatcggagaacctcccgcagccccctcaggtgtgggatctcttacaatggcttcaggtggtggcgcaccagtggcagacaataacgaaggtgccgatggagtgggtagttcctcgggaaattggcattgcgattcccaatggctgggggacagagtcatcaccaccagcacccgaacctgggccctgcccacctacaacaatcacctctacaagcaaatctccaacagcacatctggaggatcttcaaatgacaacgcctacttcggctacagcaccccctgggggtattttgacttcaacagattccactgccacttctcaccacgtgactggcagcgactcatcaacaacaactggggattccggcctaagcggctcaacttcaagctcttcaacattcaggtcaaagaggttacggacaacaatggagtcaagaccatcgccaataaccttaccagcacggtccaggtcttcacggactcagactatcagctcccgtacgtgctcgggtcggctcacgagggctgcctcccgccgttcccagcggacgttttcatgattcctcagtacgggtatctgacgcttaatgatggaagccaggccgtgggtcgttcgtccttttactgcctggaatatttcccgtcgcaaatgctaagaacgggtagcaacttccagttcagctacgagtttgagaacgtacctttccatagcagctacgctcacagccaaagcctggaccgactaatgaatccactcatcgaccaatacttgtactatctctcaaagactattaacggttctggacagaatcaacaaacgctaaaattcagtgtggccggacccagcaacatggctgtccagggaagaaactacatacctggacccagctaccgacaacaacgtgtctcaaccactgtgactcaaaacaacaacagcgaatttgcttggcctggagcttcttcttgggctctcaatggacgtaatagcttgatgaatcctggacctgctatggccagccacaaagaaggagaggaccgtttctttcctttgtctggatctttaatttttggcaaacaaggaactggaagagacaacgtggatgcggacaaagtcatgataaccaacgaagaagaaattaaaactactaacccggcagcaacggagtcctatggacaagtggccacaaaccaccagagtgcccaagcacaggcgcagaccggctgggttcaaaaccaaggaatacttccgggtatggtttggcaggacagagatgtgtacctgcaaggacccatttgggccaaaattcctcacacggacggcaactttcacccttctccgctgatgggagggtttggaatgaagcacccgcctcctcagatcctcatcaaaaacacacctgtacctgcggatcctccaacggccttcaacaaggacaagctgaactctttcatcacccagtattctactggccaagtcagcgtggagatcgagtgggagctgcagaaggaaaacagcaagcgctggaacccggagatccagcacacttccaactattacaagtctaataatgttgaatttgctgttaatactgaaggtgtatatagtgaaccccgccccattggcaccagatacctgactcgtaatctg

SEQ ID NO: 612 - DNA, 2208 bp, Artificial Sequence
  Synthetic polynucleotide
atggctgccgatggttatcttccagattggctcgaggacaaccttagtgaaggaattcgcgagtggtgggctttgaaacctggagcccctcaacccaaggcaaatcaacaacatcaagacaacgctcgaggtcttgtgcttccgggttacaaataccttggacccggcaacggactcgacaagggggagccggtcaacgcagcagacgcggcggccctcgagcacgacaaggcctacgaccagcagctcaaggccggagacaacccgtacctcaagtacaaccacgccgacgccgagttccaggagcggctcaaagaagatacgtcttttgggggcaacctcgggcgagcagtcttccaggccaaaaagaggcttcttgaacctcttggtctggttgaggaagcggctaagacggctcctggaaagaagaggcctgtagagcagtctcctcaggaaccggactcctccgcgggtattggcaaatcgggtgcacagcccgctaaaaagagactcaatttcggtcagactggcgacacagagtcagtcccagaccctcaaccaatcggagaacctcccgcagccccctcaggtgtgggatctcttacaatggcttcaggtggtggcgcaccagtggcagacaataacgaaggtgccgatggagtgggtagttcctcgggaaattggcattgcgattcccaatggctgggggacagagtcatcaccaccagcacccgaacctgggccctgcccacctacaacaatcacctctacaagcaaatctccaacagcacatctggaggatcttcaaatgacaacgcctacttcggctacagcaccccctgggggtattttgacttcaacagattccactgccacttctcaccacgtgactggcagcgactcatcaacaacaactggggattccggcctaagcgactcaacttcaggctcttcaacattcaggtcaaagaggttacggacaacaatggagtcaagaccatcgccaataaccttaccagcacggtccaggtcttcacggactcagactatcagctcccgtacgtgctcgggtcggctcacgagggctgcctcccgccgttcccagcggacgttttcatgattcctcagtacgggtatctgacgcttaatgatggaagccaggccgtgggtcgttcgtccttttactgcctggaatatttcccgtcgcaaatgctaagaacgggtaacaacttccagttcagctacgagtttgagaacgtacctttccatagcagctacgctcacagccaaagcctggaccgactaatgaatccactcatcgaccaatacttgtactatctctcaaagactattaacggttctggacagaatcaacaaacgctaaaattcagtgtggccggacccagcaacatggctgtccagggaagaaactacatacctggacccagctaccgacaacaacgtgtctcaaccactgtgactcaaaacaacaacagcgaatttgcttggcctggagcttcttcttgggctctcaatggacgtaatagcttgatgaatcctggacctgctatggccagccacaaagaaggagaggaccgtttctttcctttgtctggatctttaatttttggcaaacaaggaactggaagagacaacgtggatgcggacaaagtcatgataaccaacgaagaagaaattaaaactactaacccggtagcaacggagtcctatggacaagtggccacaaaccaccagagtgcccaagcacaggcgcagaccggctgggttcaaagccaaggaatacttccgggtatggtttggcaggacagagatgtgtacctgcaaggacccatttgggccaaaattcctcacacggacggcaactttcacccttctccgctgatgggagggtttggaatgaagcacccgcctccccagatcctcatcaaaaacacacctgtacctgcggatcctccaacggccttcaacaaggacaagctgaactctttcatcacccagtattctactggccaagtcagcgtggagatcgagtgggagctgcagaaggaaaacagcaagcgctggaacccggagatccagtacacttccaactattacaagtctaataatgttgaatttgctgttaatactgaaggtgtatatagtgaaccccgccccattggcaccagatacctgactcgtaatctg

SEQ ID NO: 613 - DNA, 2205 bp, Artificial Sequence
  Synthetic polynucleotide
atggctgccgatggttatcttccagattggctcgaggacaaccttagtgaaggaattcgcgagtggtgggctttgaaacctggagcccctcaacccaaggcaaatcaacaacatcaagacaacgcccgaggtcttgtgcttccgggttacaaataccttggacccggcaacggactcgacaagggggagccggtcaacgcagcagacgcggcggccctcgagcacgacaaggcctacgaccagcagctcaaggccggagacaacccgtacctcaagtacaaccacgccgacgccgagttccaggagcggctcaaagaagatacgtcttttgggggcaacctcgggcgagcagtcttccaggccaaaaagaggcttcttgaacctcttggtctggttgaggaagcggctaagacggctcctggaaagaagaggcctgtagagcagtctcctcaggaaccggactcctccgcgggtattggcaaatcgggtgcacagcccgctaaaaagagactcaatttcggtcagactggcgacacagagtcagtcccagaccctcaaccaatcggagaacctcccgcagccccctcaggtgtgggatctcttacaatggcttcaggtggtggcgcaccagtggcagacaataacgaaggtgccgatggagtgggtagttcctcgggaaattggcattgcgattcccaatggctgggggacagagtcatcaccaccagcacccgaacctgggccctgcccacctacaacaatcacctctacaagcaaatctccaacagcacatctggaggatcttcaaatgacaacgcctacttcggctacagcaccccctggaggtattttgacttcaacagattccactgccacttctcaccacgtgactggcagcgactcatcaacaactggggattccggcctaagcgactcaacttcaagctcttcaacattcaggtcaaagaggttacggacaacaatggagtcaagaccatcgccaataaccttaccagcacggtccaggccttcacggactcagactatcagctcccgtacgtgctcgggtcggctcacgagggctgcctcccgccgttcccagcggacgttttcatgattcctcagtacgggtatctgacgcttaatgatggaagccaggccgtgggtcgttcgtccttttactgcctggaatatttcccgtcgcaaatgctaagaacgggtaacaacttccagttcagctacgagtttgagaacgtacctttccatagcagctacgctcacagccaaagcctggaccgactaatgaatccactcatcgaccaatacttgtactatctctcaaagactattaacggttctggacagaatcaacaaacgctaaaattcagtgtggccggacccagcaacatggctgtccagggaagaaactacatacctggacccagctaccgacaacaacgtgtctcaaccactgtgactcaaaacaacaacagcgaatttgcttggcctggagcttcttcttgggctctcaatggacgtaatagcttgatgaatcctggacctgctatggccagccacaaagaaggagaggaccgtttctttcctttgtctggatctttaatttttggcaaacaaggaactggaagagacaacgtggatgcggacaaagtcatgataaccaacgaagaagaaattaaaactactaacccggtagcaacggagtcctatggacaagtggccacaaaccaccagagtgcccaagcacaggcgcagaccggctgggttcaaaaccaaggaatacttccgggtatggtttggcaggacagagatgtgtacctgcaaggacccatttgggccaaaattcctcacacggacggcaactttcacccttctccgctgatgggagggtttggaatgaagcacccgcctcctcagatcctcatcaaaaacacacctgtacctgcggatcctccaacggccttcaacaaggacgagctgaactctttcatcacccagtattctactggccaagtcagcgtggagatcgagtgggagctgcagaaggaaaacagcaagcgctggaacccggagatccagtacacttccaactattacaagtctaataatgttgaatttgctgttaatactgaaggtgtatatagtgaaccccgccccattggcaccagatacctgactcgtaatctg

SEQ ID NO: 614 - DNA, 2205 bp, Artificial Sequence
  Synthetic polynucleotide
atggctgccgatggttatcttccagattggctcgaggacaaccttagtgaaggaattcgcgagtggtgggctttgaaacctggagcccctcaacccaaggcaaatcaacaacatcaagacaacgctcgaggtcttgtgcttccgggttacaaataccttggacccggcaacggactcgacaagggggagccggtcaacgcagcagacgcggcggccctcgagcacgacaaggcctacgaccagcagctcaaggccggagacaacccgtacctcaagtacaaccacgccgacgccgagttccaggagcggctcaaagaagatacgtcttttgggggcaacctcgggcgagcagtcttccaggacaaaaagaggcttcttgaacctcttggtctggttgaggaagcggctaagacggctcctggaaagaagaggcctgtagagcagtctcctcaggaaccggactcctccgcgggtattggcaaatcgggtgcacagcccgctaaaaagagactcaatttcggtcagactggcgacacagagtcagtcccagaccctcaaccaatcggagaacctcccgcagccccctcaggtgtgggatctcttacaatggcttcaggtggtggcgcaccagtggcagacaataacgaaggtgccgatggagtgggtagttcctcgggaaattggcattgcgattcccaatggctgggggacagagtcatcaccaccagcacccgaacctgggccctgcccacctacaacaatcacctctacaagcaaatctccaacagcacatctggaggatcttcaaatgacaacgcctacttcggctacagcaccccctgggggtattttgacttcaacagattccactgccacttctcaccacgtgactggcagcgactcatcaacaactggggattccggcctaagcgactcaacttcaagctcttcaacattcaggtcaaagaggttacggacaacaatggagtcaagaccatcgccaataaccttaccagcacggtccaggtcttcacggactcagactatcagctcccgtacgtgctcgggtcggctcacgagggctgcctcccgccgttcccagcggacgttttcatgattcctcagtacgggtatctgacgcttaatgatggaagccaggccgtgggtcgttcgtccttttactgcctggaatatttcccgtcgcaaatgctaagaacgggtaacaacttccaattcagctacgagtttgagaacgtacctttccatagcagctacgctcacagccaaagcctggaccgactaatgaatccactcatcgaccaatacttgtactatctctcaaagactattaacggttctggacagaatcaacaaacgctaaaattcagtgtggccggacccagcaacatggctgtccagggaagaaactacatacctggacccagctaccgacaacaacgtgtctcaaccactgtgactcaaaacaacaacagcgaatttgcttggcctggagcttcttcttgggctctcaatggacgtaatagcttgatgaatcctggacctgctatggccagccacaaagaaggagaggaccgtttctttcctttgtctggatctttaatttttggcaaacaaggaactggaagagacaacgtggatgcggacaaagtcatgataaccaacgaagaagaaattaaaactactaacccggtagcaacggagtcctatggacaagtggccacaaaccaccagagtgcccaagcacaggcgcagaccggctgggttcaaaaccaaggaatacttccgggtatggtttggcaggacagagatgtgtacctgcaaggacccatttgggccaaaattcctcacacggacggcaactttcacccttctccgctgatgggagggtttggaatgaagcacccgcctcctcagatcctcatcaaaaacacacctgtacctgcggatcctccaacggccttcaacaaggacaagctgaactctttcatcacccagtattctactggccaagtcagcgtggagatcgagtgggagctgcagaaggaaaacagcaagcgctggaacccggagatccagtacacttccaactattacaagtctaataatgttgaatttgctgttaatactgaaggtgtatatagtgaaccccgccccattggcaccagatacctgactcgtaatctg

SEQ ID NO: 615 - DNA, 2208 bp, Artificial Sequence
  Synthetic polynucleotide
atggctgccgatggttatcttccagattggctcgaggacaaccttagtgaaggaattcgcgagtggtgggctttgaaacctggagcccctcaacccaaggcaaatcaacaacatcaagacaacgctcgaggtcttgtgcttccgggttacaaataccttggacccggcaacggactcgacaagggggagccggtcaacgcagcagacgcggcggccctcgagcacgacaaggcctacgaccagcagctcaaggccggagacaacccgtacctcaagtacaaccacgccgacgccgagttccaggagcggctcaaagaagatacgtcttttgggggcaacctcgggcgagcagtcttccaggccaaaaagaggcttcttgaacctcttggtctggttgaggaagcggctaagacggctcctggaaagaagaggcctgtagagcagtctcctcaggaaccggactcctccgcgggtattggcaaatcgggtgcacagcccgctaaaaagagactcaatttcggtcagactggcgacacagagtcagtcccagaccctcaaccaatcggagaacctcccgcagccccctcaggtgtgggatctcttacaatggcttcaggtggtggcgcaccagtggcagacaataacgaaggtgccgatggagtgggtagttcctcgggaaattggcattgcgattcccaatggctgggggacagagccatcaccaccagcacccgaacctgggccctgcccacctacaacaatcacctctacaagcaaatctccaacagcacatctggaggatcttcaaatgacaacgcctacttcggctacagcaccccctgggggtattttgacttcaacagattccactgccacttctcaccacgtgactggcagcggctcatcaacaacaactggggattccggcctaagcgactcaacttcaagctcttcaacattcaggtcaaagaggttacggacaacaatggagtcaagaccatcgccaataaccttaccagcacggtccaggtcttcacggactcagactatcagctcccgtacgtgctcgggtcggctcacgagggctgcctcccgccgttcccagcggacgttttcatgattcctcagtacgggtatctgacgcttaatgatggaagccaggccgtgggtcgttcgtccttttactgcctggaatatttcccgtcgcaaatgctaagaacgggtaacaacttccagttcagctacgagtttgagaacgtacctttccatagcagctacgctcacagccaaagcctggaccgactaatgaatccactcatcgaccaatacttgtactatctctcaaagactattaacggttctggacagaatcaacaaacgctaaaattcagtgtggccggacccagcaacatggctgtccagggaagaaactacatacctggacccagctaccgacaacaacgtgtctcaaccactgtgactcaaaacaacaacagcgaatttgcttggcctggagcttcttcttgggctctcaatggacgtaatagcttgatgaatcctggacctgctatggccagccacaaagaaggagaggaccgtttctttcctttgtctggatctttaatttttggcaaacaaggaactggaagagacaacgtggatgcggacaaagtcatgacaaccaacgaagaagaaattaaaactactaacccggtagcaacggagtcctatggacaagtggccacaaaccaccagagtgcccaagcacaggcgcagaccggctgggttcaaaaccaaggaatacttccgggtatggtttggcaggacagagatgtgtacctgcaaggacccatttgggccaaaattcctcacacggacggcaactttcacccttctccgctgatgggagggtttggaatgaagcacccgcctcctcagatcctcatcaaaaacacacctgtacctgcggatcctccaacggccttcaacaaggacaagctgaactctttcatcacccagtattctactggccaagtcagcgtggagatcgagtgggagctgcagaaggaaaacagcaagcgctggaacccggagatccagtacacttccaactattacaagtctaataatgttgaatttgctgttaatactgaaggtgtatatagtgaaccccgccccattggcaccagatacctgactcgtaatctg

SEQ ID NO: 616 - DNA, 2208 bp, Artificial Sequence
  Synthetic polynucleotide
atggctgccgatggttatcttccagattggctcgaggacaaccttagtgaaggaattcgcgagtggtgggctttgaaacctggagcccctcaacccaaggcaaatcaacaacatcaagacaacgctcgaggtcttgtgcttccgggttacaaataccttggacccggcaacggactcgacaagggggagccggtcaatgcagcagacgcggcggccctcgagcacgacaaggcctacgaccagcagctcaaggccggagacaacccgtacctcaagtacaaccacgccgacgccgagttccaggagcggctcaaagaagatacgtcttttgggggcaacctcgggcgagcagtcttccagaccaaaaagaggcttcttgaacctcttggtctggttgaggaagcggctaagacggctcctggaaagaagaggcctgtagagcagtctcctcaggaaccgggctcctccgcgggtattggcaaatcgggtgcacagcccgctaaaaagagactcaatttcggtcagactggcgacacagagtcagtcccagaccctcaaccaatcggagaacctcccgcagccccctcaggtgtgggatctcttacaatggcttcaggtggtggcgcaccagtggcagacaataacgaaggtgccgatggagtgggtagttcctcgggaaattggcattgcgattcccaatggctgggggacagagtcatcaccaccagcacccgaacctgggccctgcccacctacaacaatcacctctacaagcaaatctccaacagcacatctggaggatcttcaaatgacaacgcctacttcggctacagcaccccctgggggtattttgacttcaacagattccactgccacttctcaccacgtgactggcagcgactcatcaacaacaactggggattccggcctaagcgactcaacttcaagctcttcaacattcaggtcaaagaggttacggacaacaatggagtcaagaccatcgccaataaccttaccagcacggtccaggtcttcacggactcagactatcagctcccgtacgtgctcgggtcggctcacgagggctgcctcccgccgttcccagcggacgttttcatgattcctcagtacgggtatctgacgcttaatgatggaagccaggccgtgggtcgttcgtccttttactgcctggaatatttcccgtcgcaaatgctaagaacgggtaacaacttccagttcagctacgagtttgagaacgtacctttccatagcagctacgctcacagccaaagcctggaccgactaatgaatccactcatcgaccaatacttgcactatctctcaaagactattaacggttctggacagaatcaacaaacgctaaaattcagtgtggccggacccagcaacatggctgtccagggaagaaactacatacctggacccagctaccgacaacaacgtgtctcaaccactgtgactcaaaacaacaacagcgaatttgcttggcctggagcttcttcttgggctctcaatggacgtaatagcttgatgaatcctggacctgctatggccagccacaaagaaggagaggaccgtttctttcctttgtctggatctttaatttttggcaaacaaggaactggaagagacaacgtggatgcggacaaagtcatgataaccaacgaagaagaaattaaaactactaacccggtagcaacggagtcctatggacaagtggccacaaaccaccagagtgcccaagcacaggcgcagaccggctgggttcaaaaccaaggaatacttccgggtatggtttggcaggacagagatgtgtacctgcaaggacccatttgggccaaaattcctcacacggacggcaactttcacccttctccgctgatgggagggtttggaatgaagcacccgcctcctcagatcctcatcaaaaacacacctgtacctgcggatcctccaacggccttcaacaaggacaagctgaactctttcatcacccagtattctactggccaagtcagcgtggagatcgagtgggagctgcagaaggaaaacagcaagcgctggaacccggagatccagtacacttccaactattacaagtctaataatgttgaatttgctgttaatactgaaggtgtatatagtgaaccccgccccattggcaccagatacctgactcgtaatctg

SEQ ID NO: 617 - DNA, 2208 bp, Artificial Sequence
  Synthetic polynucleotide
atggctgccgatggttattttccagattggctcgaggacaaccttagtgaaggaattcgcgagtggtgggctttgaaacctggagcccctcaacccaaggcaaatcaacaacatcaagacaacgctcgaggtcttgtgcttccgggttacaaataccttggacccggcaacggactcgacaagggggagccggtcaacgcagcagacgcggcggccctcgagcacgacaaggcctacgaccagcagctcaaggccggagacaacccgtacctcaagtacaaccacgccgacgccgagttccaggagcggctcaaagaagatacgtcttttgggggcaacctcgggcgagcagtcttccaggccaaaaagaggcttcttgaacctcttggtctggttgaggaagcggctaagacggctcctggaaagaagaggcctgtagagcagtctcctcaggaaccggactcctccgcgggtattggcaaatcgggtgcacagcccgctaaaaagagactcaatttcggtcagactggcgacacagagtcagtcccagaccctcaaccaatcggagaatctcccgcagccccctcaggtgtgggatctcttacaatggcttcaggtggtggcgcaccagtggcagacaataacgaaggtgccgatggagtgggtagttcctcgggaaattggcattgcgattcccaatggctgggggacagagtcatcaccaccagcacccgaacctgggccctgcccacctacaacaatcacctctacaagcaaatctccaacagcacatctggaggatcttcaaatgacaacgcctacttcggctacagcaccccctgggggtattttgacttcaacagattccactgccacttctcaccacgtgactggcagcgactcatcaacaacaactggggattccggcctaagcgactcaacttcaagctcttcaacattcaggtcaaagaggttacggacaacaatggagtcaagaccatcgccaataaccttaccagcacggtccaggtcttcacggactcagactatcagctcccgtacgtgctcgggtcggctcacgagggctgcctcccgccgttcccagcggacgttttcatgattcctcagtacgggtatctgacgcttaatgatggaagccaggccgtgggtcgttcgtccttttactgcctggaatatctcccgtcgcaaatgctaagaacgggtaacaacttccagttcagctacgagtttgagaacgtacctttccatagcagctacgctcacagccaaagcctggaccgactaatgaatccactcatcgaccaatacttgcactatctctcaaagactattaacggttctggacagaatcaacaaacgctaaaattcagtgtggccggacccagcaacatggctgtccagggaagaaactacatacctggacccagctaccgacaacaacgtgtctcaaccactgtgactcaaaacaacaacagcgaatttgcttggcctggagcttcttcttgggctctcaatggacgtaatagcttgatgaatcctggacctgctgtggccagccacaaagaaggagaggaccgtttctttcctttgtctggatctttaatttttggcaaacaaggaactggaagagacaacgtggatgcggacaaagtcatgataaccaacgaagaagaaattaaaactactaacccggtagcaacggagtcctatggacaagtggccacaaaccaccagagtgcccaagcacaggcgcagaccggctgggttcaaaaccaaggaatacttccgggtatggtttggcaggacagagatgtgtacctgcaaggacccatttgggccaaaattcctcacacggacggcaactttcacccttctccgctgatgggagggtttggaatgaagcacccgcctcctcagatcctcatcaaaaacacacctgtacctgcggatcctccaacggccttcaacaaggacaagctgaactctttcatcacccagtattctactggccaagtcagcgtggagatcgagtgggagctgcagaaggaaaacagcaagcgctggaacccggagatccagtacacttccaactattacaagtctaataatgttgaatttgctgttaatactgaaggtgtatatagtgaaccccgccccattggcaccagatacctgactcgtaatctg

SEQ ID NO: 618 - DNA, 2208 bp, Artificial Sequence
  Synthetic polynucleotide
atggctgccgatggttatcttccagattggctcgaggacaaccttagtgaaggaattcgcgagtggtgggctttgaaacctggagcccctcaacccaaggcaaatcaacaacatcaagacaacgctcgaggtcttgtgcttccgggttacaaataccttggacccggcaacggactcgacaagggggagccggtcaacgcagcagacgcggcggccctcgagcacgacaaggcctacgaccagcagctcaaggccggagacaacccgtacctcaagtacaaccacgccgacgccgagttccaggagcggctcaaagaagatacgtcttttgggggcaacctcgggcgagcagtcttccaggccaaaaagaggcttcttgaacctcttggtccggttgaggaagcggctaagacggctcctggaaagaagaggcctgtagagcagtctcctcaggaaccggactcctccgcgggtattggcaaatcgggtgcacagcccgctaaaaagagactcaatttcggtcagactggcgacacagagtcagtcccagaccctcaaccaatcggagaacctcccgcagccccctcaggtgtgggatctcttacaatggcttcaggtggtggcgcaccagtggcagacaataacgaaggtgccgatggagtgggtagttcctcgggaaattggcattgcgattcccaatggctgggggacagagtcatcaccaccagcacccgaacctgggccctgcccacctacaacaatcacctctacaagcaaatctccaacagcacatctggaggatcttcaaatgacaacgcctacttcggctacagcaccccctgggggtattttgacttcaacagattccactgccacttctcaccacgtgactggcagcgactcatcaacaacaactggggattccggcctaagcgactcaacttcaagctcttcaacattcaggtcaaagaggttacggacaacaatggagtcaagaccatcgccaataaccttaccagcacggtccaggtcttcacggactcagactatcagctcccgtacgtgctcgggtcggctcacgagggctgcctcccgccgttcccagcggacgttttcatgattcctcagtacgggtatctgacgcttaatgatggaagccaggccgtgggtcgttcgtccttttactgcctggaatatttcccgtcgcaaatgctaagaacgggtaacaacttccagttcagctacgagtttgagaacgtacctttccatagcagctacgctcacagccaaagcctggaccgactaatgaatccactcatcgaccaatacttgtactatctctcaaagactattaacggttctggacagaatcaacaaacgctaaaattcagtgtggccggacccagcaacatggctgtccagggaagaaactacatacctggacccagctaccgacaacaacgtgtctcaaccactgtgactcaaaacaacaacagcgaatttgcttggcctggagcttcttcttgggctctcaatggacgtaatagcttgatgaatcctggacctgctatggccagccacaaagaaggagaggaccgtttctttcctttgtctggatctttaatttttggcaaacaaggaactggaagagacaacgtggatgcggacaaagtcatgataaccaacgaagaagaaattaaaactactaacccggtagcaacggagtcctatggacaagcggccacaaaccaccagagtgcccaagcacaggcgcagaccggctgggttcaaaaccaaggaatacttccgggtatggtttggcaggacagagatgtgtacctgcaaggacccatttgggccaaaattcctcacacggacggcaactttcacccttctccgctgatgggagggtttggaatgaagcacccgcctcctcagatcctcatcaaaaacacacctgtacctgcggatcctccaacggccttcaacaaggacaagctgaactctttcatcacccagtattctactggccaagtcagcgtggagatcgagtgggagctgcagaaggaaaacagcaagcgctggaacccggagatccagtacacttccaactattacaagtctaataatgttgaatttgctgttaatactgaaggtgtatatagtgaaccccgccccattggcaccagatacctgactcgtaatctg

SEQ ID NO: 619 - DNA, 2208 bp, Artificial Sequence
  Synthetic polynucleotide
atggctgccgatggttatcttccagattggctcgaggacaaccttagtgaaggaattcgcgagtggtgggctttgaaacctggagcccctcaacccaaggcaaatcaacaacatcaagacaacgctcggggtcttgtgcttccgggttacaaataccttggacccggcaacggactcgacaagggggagccggtcaacgcagcagacgcggcggccctcgagcacgacaaggcctacgaccagcagctcaaggccggagacaacccgtacctcaagtacaaccacgccgacgccgagttccaggagcggctcaaagaagatacgtcttttgggggcaacctcgggcgagcagtcttccaggccaaaaagaggcttcttgaacctcttggtccggttgaggaagcggctaagacggctcctggaaagaagaggcctgtagagcagtctcctcaggaaccggactcctccgcgggtattggcaaatcgggtgcacagcccgctaaaaagagactcaatttcggtcagactggcgacacagagtcagtcccagaccctcaaccaatcggagaacctcccgcagccccctcaggtgtgggatctcttacaatggcttcaggtggtggcgcaccagtggcagacaataacgaaggtgccgatggagtgggtagttcctcgggaaattggcattgcgattcccaatggctgggggacagagtcatcaccaccagcacccgaacctgggccctgcccacctacaacaatcacctctacaagcaaatctccaacagcacatctggaggatcttcaaatgacaacgcctacttcggctacagcaccccctgggggtattttgacttcaacagattccactgccacttctcaccacgtgactggcggcgactcatcaacaacaactggggattccggcctaagcgactcaacttcaagctcttcaacattcaggtcaaagaggttacggacaacaatggagtcaagaccatcgccaataaccttaccagcacggtccaggtcttcacggactcagactatcagctcccgtacgtgctcgggtcggctcacgagggctgcctcccgccgttcccagcggacgttttcatgattcctcagtacgggtatctgacgcttaatgatggaagccaggccgtgggtcgttcgtccttttactgcctggaatatttcccgtcgcaaatgctaagaacgggtaacaacttccagttcagctacgagtttgagaacgtacctttccatagcagctacgctcacagccaaagcctggaccgactaatgaatccactcatcgaccaatacttgtactatctctcaaagactattaacggttctggacagaatcaacaaacgctaaaattcagtgtggccggacccagcaacatggctgtccagggaagaaactacatacctggacccagctaccgacaacaacgtgtctcaaccactgtgactcaaaacaacaacagcgaatttgcttggcctggagcttcttcttgggctctcaatggacgtaatagcttgatgaatcctggacctgctatggccagccacaaagaaggagaggaccgtttctttcctttgtctggatctttaatttttggcaaacaaggaactggaagagacaacgtggatgcggacaaagtcatgataaccaacgaagaagaaattaaaactactaacccggtagcaacggagtcctatggacaagtggccacaaaccaccagagtgcccaagcacaggcgcagaccggctgggttcaaaaccaaggaatacttccgggtatggtttggcaggacagagatgtgtacctgcaaggacccatttgggccaaaattcctcacacggacggcaactttcacccttctccgctgatgggagggtttggaatgaagcacccgcctcctcagatcctcatcaaaaacacacctgtacctgcggatcctccaacggccttcaacaaggacaagctgaactctttcatcacccagtattctactggccaagtcagcgtggagatcgagtgggagctgcagaaggaaaacagcaagcgctggaacccggagatccagtacacttccaactattacaagtctaataatgttgaatttgctgttaatactgaaggtgtatatagtgaaccccgccccattggcaccagatacctgactcgtaatctg

SEQ ID NO: 620 - DNA, 2208 bp, Artificial Sequence
  Synthetic polynucleotide
atggctgccgatggttatcttccagattggctcgaggacaaccttagtgaaggaattcgcgagtggtgggctttgaaacctggagcccctcaacccaaggcaaatcaacaacatcaagacaacgctcgaggtcttgtgcttccgggttacaaataccttggacccggcaacggactcgacaagggggagccggtcaacgcagcagacgcggcggccctcgagcacgacaaggcctacgaccagcagctcaaggccggagacaacctgtacctcaagtacaaccacgccgacgccgagttccaggagcggctcaaagaagatacgtcttttgggggcaacctcgggcgagcagtcttccaggccaaaaagaggcttcttgaacctcttggtctggttgaggaagcggctaagacggctcctggaaagaagaggcctgtagagcagtctcctcaggaaccggactcctccgcgggtattggcaaatcgggtgcacagcccgctaaaaagagactcaatttcggtcagactggcgacacagagtcagtcccagaccctcaaccaatcggagaacctcccgcagccccctcaggtgtgggatctcttacaatggcttcaggtggtggcgcaccagtggcagacaataacgaaggtgccgatggagtgggtagttcctcgggaaattggcattgcgattcccaatggctgggggacagagtcatcaccaccagcacccgaacctgggccctgcccacctacaacaatcacctctacaagcaaatctccaacagcacatctggaggatcttcaaatgacaacgcctacttcggctacagcaccccctgggggtattttgacttcaacagattccactgccacttctcaccacgtgactggcagcgactcatcaacaacaactggggattccggcctaagcgactcaacttcaagctcttcaacattcaggtcaaagaggttacggacaacaatggagtcaagaccatcgccaataaccttaccagcacggtccaggtcttcacggactcagactatcagctcccgtacgtgctcgggtcggctcacgagggctgcctcccgccgttcccagcggacgttttcatgattcctcagtacgggtatctgacgcttaatgatggaagccaggccgtgggtcgttcgtccttttactgcctggaatatttcccgtcgcaaatgctaagaacgggtaacaacttccagttcagctacgagtttgagaacgtacctttccatagcagctacgctcacagccaaagcctggaccgactaatgaatccactcatcgaccaatacttgcactatctctcaaagactattaacggttctggacagaatcaacaaacgctaaaattcagtgtggccggacccagcaacatggctgtccagggaagaaactacatacctggacccagctaccgacaacaacgtgtctcaaccactgtgactcaaaacaacaacagcgaatttgcttggcctggagcttcttcttgggctctcaatggacgtaatagcttgatgaatcctggacctgctatggccagccacaaagaaggagaggaccgtttctttcctttgtctggatctttaatttttggcaaacaaggaactggaagagacaacgtggatgcggacaaagtcatgataaccaacgaagaagaaattaaaactactaacccggtagcaacggagtcctatggacaagtggccacaaaccaccagagtgcccaagcacaggcgcagaccggctgggttcaaaaccaaggaatacttccgggtatggtttggcaggacagagatgtgtacctgcaaggacccatttgggccaaaattcctcacacggacggcaactttcacccttctccgctgatgggagggtttggaatgaagcacccgcctcctcagatcctcatcaaaaacacacctgtacctgcggatcctccaacggccttcaacaaggacaagctgaactctttcatcacccagtattctactggccaagtcagcgtggagatcgagtgggagctgcagaaggaaaacagcaagcgctggaacccggagatccagtacacttccaactattacaagtctaataatgttgaatttgctgttaatactgaaggtgtatatagtgaaccccgccccattggcaccagatacctgactcgtaatctg

SEQ ID NO: 621 - DNA, 2208 bp, Artificial Sequence
  Synthetic polynucleotide
atggctgccgatggttatcttccagattggctcgaggacaaccttagtgaaggaattcgcgagtggtgggctttgaaacctggagcccctcaacccaaggcaaatcaacaacatcaagacaacgctcgaggtcttgtgcttccgggttacaaataccttggacccggcaacggactcgacaagggggagccggtcaacgcagcagacgcggcggccctcgagcacgacaaggcctacgaccagcagctcaaggccggagacaacccgtacctcaagtacaaccacgccgacgccgagttccaggagcggctcaaagaagatacgtcttttgggggcaacctcgggcgagcagtcttccaggccaaaaagaggcttcttgaacctcttggtctggttgaggaagcggctaagacggctcctggaaagaagaggcctgtagagcagtctcctcaagaaccggactcctccgcgggtattggcaaatcgggtgcacagcccgctaaaaagagactcaatttcggtcagactggcgacacagagtcagtcccagaccctcaaccaatcggagaacctcccgcagccccctcaggtgtgggatctcttacaatggcttcaggtggtggcgcaccagtggcagacaataacgaaggtgccgatggagtgggtagttcctcgggaaattggcattgcgattcccaatggctgggggacagagtcatcaccaccagcacccgaacctgggccctgcccacctacaacaatcacctctacaagcaaatctccaacagcacatctggaggatcttcaaatgacaacgcctacttcggctacagcaccccctgggggtattttgacttcaacagattccactgccacttctcaccacgtgactggcagcgactcatcaacaacaactggggattccggcctaagcgactcaacttcaagctcttcaacattcaggtcaaagaggttacggacaacaatggagtcaagaccatcgccaataaccttaccagcacggtccaggtcttcacggactcagactatcagctcccgtacgtgctcgggtcggctcacgagggctgcctcccgccgttcccagcggacgttttcatgattcctcagtacgggtatctgacgcttaatgatggaagccaggccgtgggtcgttcgtccttttactgcctggaatatttcccgtcgcaaatgctaagaacgggtaacaacttccagttcagctacgagtttgagaacgtacctttccatagcagctacgctcacagccaaagcctggaccgactaatgaatccactcatcgaccaatacttgcactatctctcaaagactattaacggttctggacagaatcaacaaacgctaaaattcagtgtggccggacccagcaacatggctgtccagggaagaaactacatacctggacccagctaccgacaacaacgtgtctcaaccactgtgactcaaaacaacaacagcgaatttgcttggcctggagcttcttcttgggctctcaatggacgtaatagcttgatgaatcctggacctgctatggccagccacaaagaaggagaggaccgtttctttcctttgtctggatctttaatttttggcaaacaaggaactggaagagacaacgtggatgcggacaaagtcatgataaccaacgaagaagaaattaaaactactaacccggtagcaacggagtcctatggacaagtggccacaaaccaccagagtgcccaagcacaggcgcagaccggctgggttcaaaaccaaggaatacttccgggtatggtttggcaggacagagatgtgtacctgcaaggacccatttgggccaaaattcctcacacggacggcaactttcacccttctccgctgatgggagggtttggaatgaagcacccgcctcctcagatcctcatcaaaaacacacctgtacctgcggatcctccaacggccttcaacaaggacaagctgaactctttcatcacccagtattctactggccaagtcagcgtggagatcgagtgggagctgcagaaggaaaacagcaagcgctggaacccggagatccagtacacttccaactattacaagtctaataatgttgaatttgctgttaatactgaaggtgtatatagtgaaccccgccccattggcaccagatacctgactcgtaatctg

SEQ ID NO: 622 - DNA, 2208 bp, Artificial Sequence
  Synthetic polynucleotide
  modified_base (1325)..(1325): a, c, t, or g
  misc_feature (1325)..(1325): n is a, c, g, or t
atggctgccgatggttatcttccagattggctcgaggacaaccttagtgaaggaattcgcgagtggtgggctttgaaacctggagcccctcaacccaaggcaaatcaacaacatcaagacaacgctcgaggtcttgtgcttccgggttacaaataccttggacccggcaacggactcgacaagggggagccggtcaacgcagcagacgcggcggccctcgagcacgacaaggcctacgaccagcagctcaaggccggagacaacccgtacctcaagtacaaccacgccgacgccgagttccaggagcggctcaaagaagatacgtcttttgggggcaacctcgggcgagcagtcttccaggccaaaaagaggcttcttgaacctcttggtctggttgaggaagcggctaagacggctcctggaaagaagaggcctgtagagcagtctcctcaggaaccggactcctccgcgggtattggcaaatcgggtgcacagcccgctaaaaagagactcaatttcggtcagactggcgacacagagtcagtcccagaccctcaaccaatcggagaacctcccgcagccccctcaggtgtgggatctcttacaatggcttcaggtggtggcgcaccagtggcagacaataacgaaggtgccgatggagtgggtagttcctcgggaaattggcattgcgattcccaatggctgggggacagagtcatcaccaccagcacccgaacctgggccctgcccacctacaacaatcacctctacaagcaaatctccaccagcacatctggaggatcttcaaatgacaacgcctacttcggctacagcaccccctgggggtattttgacttcaacagattccactgccacttctcaccacgtgactggcagcgactcatcaacaacaactggggattccggcctaagcgactcaacttcaagctcttcaacattcaggtcaaagaggttacggacaacaatggagtcaagaccatcgccaataaccttaccagcacggtccaggtcttcacggactcagactatcagctcccgtacgtgctcgggtcggctcacgagggctgcctcccgccgttcccagcggacgttttcatgattcctcagtacgggtatctgacgcttaatgatggaagccaggccgtgggtcgttcgtccttttactgcctggaatatttcccgtcgcaaatgctaagaacgggtaacaacttccagttcagctacgagtttgagaacgtacctttccatagcagctacgctcacagccaaagcctggaccgactaatgaatccactcatcgaccnatacttgcactatctctcaaagactattaacggttctggacagaatcaacaaacgctaaaattcagtgtggccggacccagcaacatggctgtccagggaagaaactacatacctggacccagctaccgacaacaacgtgtctcaaccactgtgactcaaaacaacaacagcgaatttgcttggcctggagcttcttcttgggctctcaatggacgtaatagcttgatgaatcctggacctgctatggccagccacaaagaaggagaggaccgtttctttcctttgtctggatctttaatttttggcaaacaaggaactggaagagacaacgtggatgcggacaaagtcatgataaccaacgaagaagaaattaaaactactaacccggtagcaacggagtcctatggacaagtggccacaaaccaccagagtgcccaagcacaggcgcagaccggctgggttcaaaaccaaggaatacttccggatatggtttggcaggacagagatgtgtacctgcaaggacccatttgggccaaaattcctcacacggacggcaactttcacccttctccgctgatgggagggtttggaatgaagcacccgcctcctcagatcctcatcaaaaacacacctgtacctgcggatcctccaacggccttcaacaaggacaagctgaactctttcatcacccagtattctactggccaagtcagcgtggagatcgagtgggagctgcagaaggaaaacagcaagcgctggaacccggagatccagtacacttccaactattacaagtctaataatgttgaatttgctgttaatactgaaggtgtatatagtgaaccccgccccattggcaccagatacctgactcgtaatctg

SEQ ID NO: 623 - DNA, 2208 bp, Artificial Sequence
  Synthetic polynucleotide
atggctgccgatggttatcttccagattggctcgaggacaaccttagtgaaggaattcgcgagtggtgggctttgaaacctggagcccctcaacccaaggcaaatcaacaacatcaagacaacgctcgaggtcttgtgcttccgggttacaaataccttggacccggcaacggactcgacaagggggagccggtcaacgcagcagacgcggcggccctcgagcacgacaaggcctacgaccagcagctcaaggccggagacaacccgtacctcaagtacaaccacgccgacgccgagttccaggagcggctcaaagaagatacgtcttttgggggcaacctcgggcgagcagtcttccaggccaaaaagaggcttcttgaacctcttggtctggttgaggaagcggctaagacggctcctggaaagaagaggcctgtagagcagtctcctcaggaaccggactcctccgcgggtattggcaaatcgggtgcacagcccgctaaaaagagactcaatttcggtcagactggcgacacagagtcagtcccagaccctcaaccaatcggagaacctcccgcagccccctcaggtgtgggatctcttacaatggcttcaggtggtggcgcaccagtggcagacaataacgaaggtgccgatggagtgggtagttcctcgggaaattggcattgcgattcccaatggctgggggacagagtcatcaccaccagcacccgaacctgggccctgcccacctacaacaatcacctctacaagcaaatctccaacagcacatctggaggatcttcaaatgacaacgcctacttcggctacagcaccccctgggggtattttgacttcaacagattccactgccacttctcaccacgtgactggcagcgactcatcaacaacaactggggattccggcctaagcgactcaacttcaagctcttcaacattcaggtcaaagaggttacggacaacaatggagtcaagaccatcgccaataaccttaccagcacggtccaggtcttcacggactcagactatcagctcccgtacgtgctcgggtcggctcacgagggctgcctcccgccgttcccagcggacgttttcatgattcctcagtacgggtatctgacgcttaatgatggaagccaggccgtgggtcgttcgtccttttactgcctggaatatttcccgtcgcaaatgctaagaacgggtaacaacttccagttcagctacgagtttgagaacgtacctttccatagcagctacgctcacagccaaagcctggaccgactaatgaatccactcatcgaccaatacttgcactatctctcaaagactattaacggttctggacagaatcaacaaacgctaaaattcagtgtggccggacccagcaacatggctgtccagggaagaaactacatacctggacccagctaccgacaacaacgtgtctcaaccactgtgactcaaaacaacaacagcgaatttgcttggcctggagcttcttcttgggctctcaatggacgtaatagcttgatgaatcctggacctgctatggccagctacaaagaaggagaggacagtttctttcctttgtctggatctttaatttttggcaaacaaggaactggaagagacaacgtggatgcggacaaagtcatgataaccaacgaagaagaaattaaaactactaacccggtagcaacggagtcctatggacaagtggccacaaaccaccagagtgcccaagcacaggcgcagaccggctgggttcaaaaccaaggaatacttccgggtatggtttggcaggacagagatgtgtacctgcaaggacccatttgggccaaaattcctcacacggacggcaactttcacccttctccgctgatgggagggtttggaatgaagcacccgcctcctcagaccctcatcaaaaacacacctgtacctgcggatcctccaacggccttcaacaaggacaagctgaactctttcatcacccagtattctactggccaagtcagcgtggagatcgagtgggagctgcagaaggaaaacagcaagcgctggaacccggagatccagtacacttccaactattacaagtctaataatgttgaatttgctgttaatactgaaggtgtatatagtgaaccccgccccattggcaccagatacctgactcgtaatctg

SEQ ID NO: 624 - DNA, 2208 bp, Artificial Sequence; identical to SEQ ID NO: 607
  Synthetic polynucleotide

SEQ ID NO: 625 - DNA, 2208 bp, Artificial Sequence
  Synthetic polynucleotide
atggctgccgatggttatcttccagattggctcgaggacaaccttagtgaaggaattcgcgagtggtgggctttgaaacctggagcccctcaacccagggcaaatcaacaacatcaagacaacgctcgaggtcttgtgcttccgggttacaaataccttggacccggcaacggactcgacaagggggagccggtcaacgcagccgacgcggcggccctcgagcacgacaaggcctacgaccagcagctcaaggccggagacaacccgtacctcaagtacaaccacgccgacgccgagttccaggagcggctcaaagaagatacgtcttttgggggcaacctcgggcgagcagtcttccaggccaaaaagaggcttcttgaacctcttggtctggttgaggaagcggctaagacggctcctggaaagaagaggcctgtagagcagtctcctcaggaaccggactcctccgcgggtattggcaaatcgggtgcacagcccgctaaaaagagactcaatttcggtcagactggcgacacagagtcagtcccagaccctcaaccaatcggagaacctcccgcagccccctcaggtgtgggatctcttacaatggcttcaggtggtggcgcaccagtggcagacaataacgaaggtgccgatggagtgggtagttcctcgggaaattggcattgcgattcccaatggctgggggacagagtcatcaccaccagcacccgaacctgggccctgcccacctacaacaatcacctctacaagcaaatctccaacagcacatctggaggatcttcaaatgacaacgcctacttcggctacagcaccccctgggggtattttgacttcaacagattccactgccacttctcaccacgtgactggcagcgactcatcaacaacaactggggattccggcctaagcgactcaacttcaagctcttcaacattcaggtcaaagaggttacggacaacaatggagtcaagaccatcgccaataaccttaccagcacggtccaggtcttcacggactcagactgtcagctcccgtacgtgctcgggtcggctcacgagggctgcctcccgccgttcccagcggacgttttcatgattcctcagtacgggtatctgacgcttaatgatggaagccaggccgtgggtcgttcgtccttttactgcctggaatatttcccgtcgcaaatgctaagaacgggtaacaacttccagttcagctacgagtttgagaacgtacctttccatagcagctacgctcacagccaaagcctggaccgactaacgaatccactcatcgaccaatacttgtactatctctcaaagactattaacggttctggacagaatcaacaaacgctaaaattcagtgtggccggacccagcaacatggctgtccagggaagaaactacatacctggacccagctaccgacaacaacgtgtctcaaccactgtgactcaaaacaacaacagcgaatttgcttggcctggagcttcttcttgggctctcaatggacgtaatagcttgatgaatcctggacctgctatggccagccacaaagaaggagaggaccgtttctttcctttgtctggatctttaatttttggcaaacaaggaactggaagagacaacgtggatgcggacaaagtcatgataaccaacgaagaagaaattaaaactactaacccggtagcaacggagtcccatggacaagtggccacaaaccaccagagtgcccaagcacaggcgcagaccggctgggttcaaaaccaaggaatacttccgggtatggtttggcaggacagagatgtgtacctgcaaggacccatttgggccaaaattcctcacacggacggcaactttcacccttctccgctgatgggagggtttggaatgaagcacccgcctcctcagatcctcatcaaaaacacacctgtacctgcggatcctccaacggccttcaacaaggacaagctgaactctttcatcacccagtattctactggccaagtcagcgtggagatcgagtgggagctgcagaaggaaaacagcaagcgctggaacccggagatccagtacacttccaactattacaagtctaataatgttgaatttgctgttaatactgaaggtgtatatagtgaaccccgccccattggcaccagatacctgactcgtaatctg

SEQ ID NO: 626 - DNA, 2208 bp, Artificial Sequence
  Synthetic polynucleotide
atggctgccgatggttatcttccagattggctcgaggacaaccttagtgaaggaattcgcgagtggtgggctttgaaacctggagcccctcaacccaaggcaaatcaacaacatcaagacaacgctcgaggtcttgtgcttccgggttacaaataccttggacccggcaacggactcgacaagggggagccggtcaacgcagcagacgcggcggccctcgagcacgacaaggcctacgaccagcagctcaaggccggagacaacccgtacctcaagtacaaccacgccgacgccgagttccaggagcggctcaaagaagatacgtcttttgggggcaacctcgggcgagcagtcttccaggccaaaaagaggcttcttgaacctcttggtctggttgaggaagcggctaagacggctcctggaaagaagaggcctgtagagcagtctcctcaggaaccggactcctccgcgggtattggcaaatcgggtgcacagcccgctaagaagagactcaatttcggtcagactggcgacacagagtcagtcccagaccctcaaccaatcggagaacctcccgcagccccctcaggtgtgggatctcttacaatggcttcaggtggtggcgcaccagtggcagacaataacgaaggtgccgatggagtgggtagttcctcgggaaattggcattgcgattcccaatggctgggggacagagtcatcaccaccagcacccgaacctgggccctgcccacctacaacaatcacctctacaagcaaatctccaacagcacatctggaggatcttcaaatgacaacgcctacttcggctacagcaccccctgggggtattttgacttcaacagattccactgccacttctcaccacgtgactggcagcgactcatcaacaacaactggggattccggcctaagcgactcaacttcaagctcttcaacattcaggtcaaagaggttacggacaacaatggagtcaagaccatcgccaataaccttaccagcacggtccaggtcttcacggactcagactatcagctcccgtacgtgctcgggtcggctcacgagggctgcctcccgccgttcccagcggacgttttcatgattcctcagtacgggtatctgacgcttaatgatggaagccaggccgtgggtcgttcgtccttttactgcctggaatatttcccgtcgcaaatgctaagaacgggtaacaacttccagttcagctacgagtttgagaacgtacctttccatagcagctacgctcacagccaaagcctggaccgactaatgaatccacccatcgaccaatacttgtactatctctcaaagactattaacggttctggacagaatcaacaaacgctaaaattcagtgtggccggacccagcaacatggctgtccagggaagaaactacatacctggacccagctaccgacaacaacgtgtctcaaccactgtgactcaaaacaacaacagcgaatttgcttggcctggagcttcttcttgggctctcaatggacgtaatagcttgatgaatcctggacctgctatggccagccacaaagaaggagaggaccgtttctttcctttgtctggatctttaatttttggcaaacaaggaactggaagagacaacgtggatgcggacaaagtcatgataaccaacgaagaagaaattaaaactactaacccggtagcaacggagtcctatggacaagtggccacaaaccaccagagtgcccaagcacaggcgcagaccggctgggttcaaaaccaaggaatacttccgggtatggtttggcaggacagagatgtgtacctgcaaggacccatttgggccaaaattcctcacacggacggcaactttcacccttctccgctgatgggagggtttggaatgaagcacccgcctcctcagatcctcatcaaaaacacacctgtacctgcggatcctccaacggccttcaacaaggacaagctgaactctttcatcacccagtattctactggccaagtcagcgtggagatcgagtgggagctgcagaaggaaaacagcaagcgctggaacccggagatccagtacacttccaactattacaagtctaataatgttgaatttgctgttaatactgaaggtgtatatggtgaaccccgccccattggcaccagatacctgactcgtaatctg

SEQ ID NO: 627 - DNA, 2208 bp, Artificial Sequence
  Synthetic polynucleotide
atggctgccgatggttatcttccagattggctcgaggacaaccttagtgaaggaattcgcgagtggtgggctttgaaacctggagcccctcaacccaaggcaaatcaacaacatcaagacaacgctcgaggtcttgtgcttccgggttacaaataccttggacccggcaacggactcgacaagggggagccggtcaacgcagcagacgcggcggccctcgagcacgacaaggcctacgaccagcagctcaaggccggagacaacccgtacctcaagtacaaccacgccgacgccgagttccaggagcggctcaaagaagatacgtcttttgggggcaacctcgggcgagcagtcttccaggccaaaaagaggcttcttgaacctcttggtctggttgaggaagcggctaagacggctcctggaaagaagaggcctgtagagcagtctcctcaggaaccggactcctccgcgggtattggcaaatcgggtgcacagcccgctaaaaagagactcaatttcggtcagactggcgacacagagtcagtcccagaccctcaaccaatcggagaacctcccgcagccccctcaggtgtgggatctcttacaatggcttcaggtggtggcgcaccagtggcagacaataacgaaggtgccgatggagtgggtagttcctcgggaaattggcattgcgattcccaatggctgggggacagagtcatcaccaccagcacccgaacctgggccctgcccacctacaacaatcacctctacaagcaaatctccaacagcacatctggaggatcttcaaatgacaacgcctacttcggctacagcaccccctgggggtattttgacttcaacagattccactgccacttctcaccacgtgaccggcagcgactcatcaacaacaactggggattccggcctaagcgactcaacttcaagctcttcaacattcaggtcaaagaggttacggacaacaatggagtcaagaccatcgccaataaccttaccagcacggtccaggtcttcacggactcagactatcagctcccgtacgtgctcgggtcggctcacgagggctgcctcccgccgttcccagcggacgttttcatgattcctcagtacgggtatctgacgcttaatgatggaagccaggccgtgggtcgttcgtccttttactgcctggaatatttcccgtcgcaaatgctaagaacgggtaacaacttccagttcagctacgagtttgagaacgtacctttccatagcagctacgctcacagccaaagcctggaccgactaatgaatccactcatcgaccaatacttgtactatctctcaaagactattaacggttctggacagaatcaacaaacgctaaaattcagtgtggccggacccagcaacatggctgtccagggaagaaactacatacctggacccagctaccgacaacaacgtgtctcaaccactgtgactcaaaacaacaacagcgaatttgcttggcctggagcttcttcttgggctctcaatggacgtaatagcttgatgaatcctggacctgctatggccagccacaaagaaggagaggaccgtttctttcctttgtctggatctttaatttttggcaaacaaggaactggaagagacaacgtggatgcggacaaagtcatgataaccaacgaagaagaaattaaaactactaacccggtagcaacggagtcctatggacaagtggccacaaaccaccagagtgcccaagcacaggcgcagaccggctgggttcaaaaccaaggaatacttccgggtatggtttggcaggacagagatgtgtacctgcaaggacccatttgggccaaaattcctcacacggacggcaactttcacccttctccgctgatgggagggtttggaatgaagcacccgcctcctcagatcctcatcaaaaacacacctgtacctgcggatcctccaacggccttcaacaaggacaagctgaactctttcatcacccagtattctactggccaagtcagcgtggagatcgagtgggagctgcagaaggaaaacagcaagcgctggaacccggagatccagtacacttccaactattacaagtctaataatgttgaatttgctgttaatactgaaggtgtatatagtgaaccccgccccattggcaccagatacctgactcgtaatctg

SEQ ID NO: 628 - DNA, 2208 bp, Artificial Sequence
  Synthetic polynucleotide
atggctgccgatggttatcttccagattggctcgaggacaaccttagtgaaggaattcgcgagtggtgggctttgaaacctggagcccctcaacccaaggcaaatcaacaacatcaagacaacgctcgaggtcttgtgcttccgggttacaaataccttggacccggcaacggactcgacaagggggagccggtcaacgcagcagacgcggcagccctcgagcacgacaaggcctacgaccagcagctcaaggccggagacaacccgtacctcaagtacaaccacgccgacgccgagttccaggagcggctcaaagaagatacgtcttttgggggcaacctcgggcgagcagtcttccaggccaaaaagaggcttcttgaacctcttggtctggttgaggaagcggctaagacggctcctggaaagaagaggcctgtagagcagtctcctcaggaaccggactcctccgcgggtattggcaaatcgggtgcacagcccgctaaaaagagactcaatttcggtcagactggcgacacagagtcagtcccagaccctcaaccaatcggagaacctcccgcagccccctcaggtgtgggatctcttacaatggcttcaggtggtggcgcaccagtggcagacaataacgaaggtgccgatggagtgggtagttcctcgggaaattggcattgcaattcccaatggctgggggacagagtcatcaccaccagcacccgaacctgggccctgcccacctacaacaatcacctctacaagcaaatctccaacagcacatctggaggatcttcaaatgacaacgcctacttcggctacagcaccccctgggggtattttgacttcaacagattccactgccacttctcaccacgtgactggcagcgactcatcaacaacaactggggattccggcctaagcgactcaacttcaagctcttcaacattcaggtcaaagaggttacggacaacaatggagtcaagaccatcgccaataaccttaccagcacggtccaggtcttcacggactcagactatcagctcccgtacgtgctcgggtcggctcacgagggctgcctcccgccgttcccagcggacgttttcatgattcctcagtacgggtatctgacgcttaatgatggaagccaggccgtgggtcgttcgtccttttactgcctggaatatttcccgtcgcaaatgctaagaacgggtaacaacttccagttcagctacgagtttgagaacgtacctttccatagcagctacgctcacagccaaagcctggaccgactaatgaatccactcatcgaccaatacttgtactatctctcaaagactattaacggttctggacagaatcaacaaacgctaaaattcagtgtggccggacccggcaacatggctgtccagggaagaaactacatacctggacccagctaccgacaacaacgtgtctcaaccactgtgactcaaaacaacaacagcgaatttgcttggcctggagcttcttcttgggctctcaatggacgtaatagcttgatgaatcctggacctgctatggccagccacaaagaaggagaggaccgtttctttcctttgtctggatctttaatttttggcaaacaaggaactggaagagacaacgtggatgcggacaaagtcatgataaccaacgaagaagaaattaaaactactaacccggtagcaacggagtcctatggacaagtggccacaaaccaccagagtgcccaagcacaggcgcagaccggctgggttcaaaaccaaggaatacttccgggtatggtttggcaggacagagatgtgtacctgcaaggacccatttgggccaaaattcctcacacggacggcaactttcacccttctccgctgatgggagggtttggaatgaagcacccgcctcctcagatcctcatcaagaacacacctgtacctgcggatcctccaacggccttcaacaaggacaagctgaactctttcatcacccagtattctactggccaagtcagcgtggagatcgagtgggagctgcagaaggaaaacagcaagcgctggaacccggagatccagtacacttccaactattacaagtctaataatgttgaatttgctgttaatactgaaggtgtatatagtgaaccccgccccattggcaccagatacctgactcgtaatctg

SEQ ID NO: 629 - DNA, 2208 bp, Artificial Sequence
  Synthetic polynucleotide
atggctgccgatggttatcttccagattggctcgaggacaaccttagtgaaggaattcgcgagtggtgggctttgaaacctggagcccctcaacccaaggcaaatcaacaacatcaagacaacgctcgaggtcttgtgcttccgggttacagataccttggacccggcaacggactcgacaagggggagccggtcaacgcagcagacgcggcggccctcgagcacgacaaggcctacgaccagcagctcaaggccggagacaacccgtacctcaagtacaaccacgccgacgccgagttccaggagcggctcaaagaagatacgtcttttgggggtaacctcgggcgagcagtcttccaggccaaaaagaggcttcttgaacctcttggtctggttgaggaagcggctaagacggctcctggaaagaagaggcctgtagagcagtctcctcaggaaccggactcctccgcgggtatcggcaaatcgggtgcacagcccgctaaaaagagactcaatttcggtcagactggcgacacagagtcagtcccagaccctcaaccaatcggagaacctcccgcagccccctcaggtgtgggatctcttacaatggcttcaggtggtggcgcaccagtggcagacaataacgaaggtgccgatggagtgggtagttcctcgggaaattggcattgcgattcccaatggctgggggacagagtcatcaccaccagcacccgaacctgggccctgcccacctacaacaatcacctctacaagcaaatctccaacagcacatctggaggatcttcaaatgacaacgcctacttcggctacagcaccccctgggggtattttgacttcaacagattccactgccacttctcaccacgtgactggcagcgactcatcaacaacaactggggattccggcctaagcgactcaacttcaagctcttcaacattcaggtcaaagaggttacggacaacaatggagtcaagaccgtcgccaataaccttaccagcacggtccaggtcttcacggactcagactatcagctcccgtacgtgctcgggtcggctcacgagggctgcctcccgccgttcccagcggacgttttcatgattcctcagtacgggtatctgacgcttaatgatggaagccaggccgtgggtcgttcgtccttttactgcctggaatatttcccgtcgcaaatgctaagaacgggtaacaacttccagttcagctacgagtttgagaacgtacctttccatagcagctacgctcacagccaaagcctggaccgactaatgaatccactcatcgaccaatacttgtactatctctcaaagactattaacggttctggacagaatcaacaaacgctaaaattcagtgtggccggacccagcaacatggctgtccagggaagaaactacatacctggacccagctaccgacaacaacgtgtctcaaccactgtgactcaaaacaacaacagcgaatttgcttggcctggagcttcttcttgggctctcaatggacgtaatagcttgatgaatcctggacctgctatggccagccacaaagaaggagaggaccgtttctttcctttgtctggatctttaatttttggcaaacaaggaactggaagagacaacgtggatgcggacaaagtcatgataaccaacgaagaagaaattaaaactactaacccggtagcaacggagtcctatggacaagtggccacaaaccaccagagtgcccaagcacaggcgcagaccggctgggttcaaaaccaaggaatacttccgggtatggtttggcaggacagagatgtgtacctgcaaggacccatttgggccaaaattcctcacacggacggcaactttcacccttctccgctgatgggagggtttggaatgaagcacccgcctcctcagatcctcatcaaaaacacacctgtacctgcggatcctccaacggccttcaacaaggacaagctgaactctttcatcacccagtattctactggccaagtcagcgtggagatcgagtgggagctgcagaaggaaaacagcaagcgctggaacccggagatccagtacacttccaactattacaagtctaataatgttgaatttgctgttaatactgaaggtgtatatagtggaccccgccccattggcaccagatacctgactcgtaatctg

SEQ ID NO: 630 - DNA, 2208 bp, Artificial Sequence
  Synthetic polynucleotide
atggctgccgatggttatcttccagattggctcgaggacaaccttagtgaaggaattcgcgagtggtgggctttgaaacctggagcccctcaacccaaggcaaatcaacaacatcaagacaacgctcgaggtcttgtgcttccgggttacaaataccttggacccggcaacggactcgacaagggggagccggtcaacgcagcagacgcggcggccctcgagcacgacaaggcctacgaccagcagctcaaggccggagacaacccgtacctcaagtacaaccacgccgacgccgagttccaggagcggctcaaagaagatacgtcttttgggggcaacctcgggcgagcagtcttccaggccaaaaagaggcttcttgaacctcttggtctggttgaggaagcggctaagacggctcctggaaagaagaggcctgtagagcagtctcctcaggaaccggactcctccgcgggtattggcaaatcgggtgcacagcccgctaaaaagagactcaatttcggtcagactggcgacacagagtcagtcccagaccctcaaccaatcggagaacctcccgcagccccctcaggtgtgggatctcttacaatggcttcaggtggtggcgcaccagtggcagacaataacgaaggtgccgatggagtgggtagttcctcgggaaattggcattgcgattcccaatggctgggggacagagtcatcaccaccagcacccgaacctgggccctgcccacctacaacaatcacctctacaagcaaatctccaacagcacatctggaggatcttcaaatgacaacgcctacttcggctacagcaccccctgggggtattttgacttcaacagattccactgccacttctcaccacgtgactggcagcgactcatcaacaacaactggggattccggcctaagcgactcaacttcaagctcttcaacattcaggtcaaagaggttacggacaacaatggagtcaagaccatcgccaataaccttaccagcacggtccaggtcttcacggactcagactatcagctcccgtacgtgctcgggtcggctcacgagggctgcctcccgccgttcccagcggacgttttcatgattcctcagtacgggtatctgacgcttaatgatggaagccaggccgtgggtcgttcgtccttttactgcctggaatatttcccgtcgcaaatgctaagaacgggtaacaacttccagttcagctacgagtttgagaacgtacctttccatagcagctacgctcacagccaaagcctggaccgactaatgaatccactcatcgaccaatacttgtactatctctcaaagactattaacggttctggacagaatcaacaaacgctaaaattcagtgtggccggacccagcaacatggctgtccagggaagaaactacatacctggacccagctaccgacaacaacgtgtctcaaccactgtgactcaaaacaacaacagcgaatttgcttggcctggagcttcttcttgggctctcaatggacgtaatagcttgatgaatcctggacctgctatggccagccacaaagaaggagaggaccgtttctttcctttgtctggatctttaatttttggcaaacaaggaactggaagagacaacgtggatgcggacaaagtcatgataaccaacgaagaagaaattaaaactactaacccggtagcaacggagtcctatggacaagtggccacaaaccaccagagtgcccaagcacaggcgcagaccggctgggttcaaaaccaaggaatacttccgggtatggtttggcaggacagagatgtgtacctgcaaggacccatttgggccaaaattcctcacacggacggcaactttcacccttctccgctgatgggagggtttggaatgaagcacccgcctcctcagatcctcatcaaaaacacacctgtacctgcggatcctccaacggccttcaacaaggacaagctgaactctttcatcacccagtattctactggccaagtcagcgtggagatcgagtgggagctgcagaaggaaaacagcaagcgctggaacccggagatccagtacacttccaactattacaagtctaataatgttgaatttgctgttaatactgaaggtgtatatagtgaaccccgccccattggcaccagatacctgactcgtaatctg

SEQ ID NO: 631 - DNA, 2208 bp, Artificial Sequence
  Synthetic polynucleotide
atggctgccgatggttatcttccagattggctcgaggacaaccttagtgaaggaattcgcgagtggtgggctttgaaacctggagcccctcaacccaaggcaaatcaacaacgtcaagacaacgctcgaggtcttgtgcttccgggttacaaataccttggacccggcaacggactcgacaagggggagccggtcaacgcagcagacgcggcggccctcgagcacgacaaggcctacgaccagcagctcaaggccggaggcaacccgtgcctcaagtacaaccacgccgacgccgagttccaggagcggctcaaagaagatacgtcttttgggggcaacctcgggcgagcagtcttccaggccaaaaagaggcttcttgaacctcttggtctggttgaggaagcggctaagacggctcctggaaagaagaggcctgtagagcagtctcctcaggaaccggactcctccgcgggtattggcagatcgggtgcacagcccgctaaaaagagactcaatttcggtcagactggcgacacagagtcagtcccagaccctcaaccaatcggagaacctcccgcagccccctcaggtgtgggatctcttacaatggcttcaggtggtggcgcaccagtggcagacaataacgaaggtgccgatggagtgggtagttcctcgggaaattggcattgcgattcccaatggctgggggacagagtcatcaccaccagcacccgaacctgggccctgcccacctacaacaatcacctctacaagcaaatctccaacagcacatctggaggatcttcaaatgacaacgcctacttcggctacagcaccccctgggggtattttgacttcaacagattccactgccacttctcaccacgtgactggcagcgactcatcaacaacaactggggattccggcctaagcgactcaacttcaagctcttcaacattcaggtcaaagaggttacggacaacaatggagtcaaggccatcgccaataaccttaccagcacggtccaggtcttcacggactcagactatcagctcccgtacgtgctcgggtcggctcacgagggctgcctcccgccgttcccagcggacgttttcatgattcctcagtacgggtatctgacgcttaatgatggaagccaggccgtgggtcgttcgtccttttactgcctggaatatttcccgtcgcaaatgctaagaacgggtaacaacttccagttcagctacgagtttgagaacgtacctttccatagcagctacgctcacagccaaagcctggaccgactaatgaatccactcatcgaccaatacttgtactatctctcaaagactattgacggttctggacagaatcaacaaacgctaaaattcagtgtggccggacccagcaacatggctgtccagggaagaaactacatacctggacccagctaccgacaacaacgtgtctcaaccactgtgactcaaaacaacaacagcgaatttgcttggcctggagcttcttcttgggctctcaatggacgtaatagcttgatggatcctggacctgctatggccagccacaaagaaggagaggaccgtttctttcctttgtctggatctttaatttttggcaaacaaggaactggaagagacaacgtggatgcggacaaagtcatgataaccaacgaagaagaaattaaaactactaacccggtagcaacggagtcctatggacaagtggccacaaaccaccagagtgcccaagcacaggcgcagaccggctgggttcaaaaccaaggaatacttccgggtatggtttggcaggacagagatgtgtacctgcaaggacccatttgggccaaaattcctcacacgggcggcaactttcacccttctccgctgatgggagggtttggaatgaagcacccgcctcctcagatcctcatcaaaaacacacctgtacctgcggatcctccaacggccttcaacaaggacaagctgaactctttcatcacccagtattctactggccaagtcagcgtggagatcgagtgggagctgcagaaggaaaacagcaagcgctggaacccggagatccagtacacttccaactattacaagtctaataatgttgaatttgctgttaatactgaaggtgtatatagtgaaccccgccccattggcaccagatacctgactcgtaatctg

SEQ ID NO: 632 - DNA, 2208 bp, Artificial Sequence
  Synthetic polynucleotide
atggctgccgatggttatcttccagattggctcgaggacaaccttagtgaaggaattcgcgagtggtgggctttgaaacctggagcccctcaacccaaggcaaatcaacaacatcaagacaacgctcgaggtcttgtgcttccgggttacaaataccttggacccggcaacggactcgacaagggggagccggtcaacgcagcagacgcggcggccctcgagcacgacaaggcctacgaccagcagctcaaggccggagacaacccgtacctcaagtacaaccacgccgacgccgagttccaggagcggctcaaagaagatacgtcttttgggggcaacctcgggcgagcagtcttccaggccaaaaagaggcttcttgaacctcttggtctggttgaggaagcggctaagacggctcctggaaagaagaggcctgtagagcagtctcctcaggaaccggactcctccgcgggtattggcaaatcgggtgcacagcccgctaaaaagagactcaatttcggtcagactggcgacacagagtcagtcccagaccctcaaccaatcggagaacctcccgcagccccctcaggtgtgggatctcttacaatggcttcaggtggtggcgcaccagtggcagacaataacgaaggtgccgatggagtgggtagttcctcgggaaattggcattgcgattcccaatggctgggggacagagtcatcaccaccagcacccgaacctgggccctgcccacctacaacaatcacctctacaagcaaatctccaacagcacatctggaggatcttcaaatgacaacgcctacttcggctacagcaccccctgggggtattttgacttcaacagattccactgccacttctcaccacgtgactggcagcgactcatcaacaacaactggggattccggcctaagcgactcaacttcaagctcttcaacattcaggtcaaagaggttacggacaacaatggagtcaagaccatcgccaataaccttaccagcacggtccaggtcttcacggactcagactatcagctcccgtacgtgctcgggtcggctcacgagggctgcctcccgccgttcccagcggacgttttcatgattcctcagtacgggtatctgacgcttaatgatggaagccaggccgtgggtcgttcgtccttttactgcctggaatatttcccgtcgcaaatgctaagaacgggtaacaacttccagttcagctacgagtttgagaacgtacctttccatagcagctacgctcacagccaaagcctggaccgactaatgaatccactcatcgaccaatacttgtactatctctcaaagactattaacggttctggacagaatcaacaaacgctaaaattcagtgtggccggacccagcaacatggctgtccagggaagaaactacatacctggacccagctaccgacaacaacgtgtctcaaccactgtgactcaaaacaacaacagcgaatttgcttggcctggagcttcttcttgggctctcaatggacgtaatagcttgatgaatcctggacctgctatggccagccacaaagaaggagaggaccgtttctttcctttgtctggatctttaatttttggcaaacaaggaactggaagagacaacgtggatgcggacaaagtcatgataaccaacgaagaagaaattaaaactactaacccggtagcaacggagtcctatggacaagtggccacaaaccaccagagtgcccaagcacaggcgcagaccggctgggttcaaaaccaaggaatacttccgggtatggtttggcaggacagagatgtgtacctgcaaggacccatttgggccaaaattcctcacacggacggcaactttcacccttctccgctgatgggagggtttggaatgaagcacccgcctcctcagatcctcatcaaaaacacacctgtacctgcggatcctccaacggccttcaacaaggacaagctgaactctttcatcacccagtattctactggccaagtcagcgtggagatcgagtgggagctgcagaaggaaaacagcaagcgctggaacccggagatccagtacacttccaactattacaagcctaataatgttgaatttgctgttaatactgaaggtgtatatagtgaaccccgccccattggcaccagatacctgactcgtaatctg

SEQ ID NO: 633 - DNA, 2208 bp, Artificial Sequence
  Synthetic polynucleotide
atggctgccgatggttatcttccagattggctcgaggacaaccttagtgaaggaattcgcgagtggtgggctttgaaacctggagcccctcaacccaaggcaaatcaacaacatcaagacaacgctcgaggtcttgtgcttccgggttacaaataccttggacccggcaacggactcgacaagggggagccggtcaacgcagcagacgcggcggccctcgagcacaacaaggcctacgaccagcagctcaaggccggagacaacccgtacctcaagtgcaaccacgccgacgccgagttccaggagcggctcaaagaagatacgtcttttgggggcaacctcgggcgagcagtcttccaggccaaaaagaggcctcttgaacctcttggtctggttgaggaagcggctaagacggctcctggaaagaagaggcctgtagagcagtctcctcaggaaccggactcctccgcgggtattggcaaatcgggtgcacagcccgctaaaaagagactcaatttcggtcagactggcgacacagagtcagtcccagaccctcaaccaatcggagaacctcccgcagccccctcaggtgtgagatctcttacaatggcttcaggtggtggcgcaccagtggcagacaataacgaaggtgccgatggagtgggtagttcctcgggaaattggcattgcgattcccaatggctgggggacagagtcatcaccaccagcacccgaacctgggccctgcccacctacaacaatcacctctacaagcaaatctccaacagcacatctggaggatcttcaaatgacaacgcctacctcggctacagcaccccctgggggtattttgacttcaacagattccactgccacttctcaccacgtgactggcagcgactcatcaacaacaactggggattccggcctaagcgactcaacttcaagctcttcaacattcaggtcaaagaggttacggacaacaatggagtcaagaccatcgccaataaccttaccagcacggtccaggtcttcacggactcagactatcagctcccgtacgtgctcgggtcggctcacgagggctgcctcccgccgttcccagcggacgttttcatgattcctcagtacgggtatctgacgcttaatgatggaagccaggccgtgggtcgttcgtccttttactgcctggaatatttcccgtcgcaaatgctaagaacgggtaacaacttccagttcagctacgagtttgagaacgtacctttccatagcagctacgctcacagccaaagcctggaccgactaatgaatccactcatcgaccaatacttgtactatctctcaaagactattaacggttctggacagaatcaacaaacgctaaaattcagtgtggccggacccagcaacatggctgtccagggaagaaactacatacctggacccagctaccgacaacaacgtgtctcaaccactgtgactcaaaacaacaacagcgaatttgcttggcctggagcttcttcttgggctctcaatggacgtaatagcttgatgaatcctggacctactatggccagccacaaagaaggagaggaccgtttctttcctttgtctggatctttaatttttggcaaacaaggaactggaagagacaacgtggatgcggacaaagtcatgataaccaacgaagaagaaattaaaactactaacccggtagcaacggagtcctatggacaagtggccacaaaccaccagagtgcccaagcacaggcgcagaccggctgggttcaaaaccaaggaatacttccgggtatggtttggcaggacagagatgtgtacctgcaaggacccatttgggccaaaattcctcacacggacggcaactttcacccttctccgctgatgggagggtttggaatgaagcacccgcctcctcagatcctcatcaaaaacacacctgtacctgcggatcctccaacggccttcaacaaggacaagctgaactctttcatcacccagtattctactggccaagtcagcgtggagatcgagtgggagctgcagaaggaaaacagcaagcgctggaacccggagatccagtacacttccaactattacaagtctaataatgttgaatttgctgttaatactgaaggtgtatatagtgaaccccgccccattggcaccagatacctgactcgtaatctg

SEQ ID NO: 634 - DNA, 2208 bp, Artificial Sequence
  Synthetic polynucleotide
atggctgccgatggttatcttccagattggctcgaggacaaccttagtgaaggaattcgcgagtggtgggctttgaaacctggagcccctcaacccaaggcaaatcaacaacatcaagacaacgctcgaggtcttgtgcttccgggttacaaataccttggacccggcaacggactcgacaagggggagccggtcaacgcagcagacgcggcggccctcgtgcacgacaaggcctacgaccagcagctcaaggccggagacaacccgtacctcaagtgcaaccacgccgacgccgagttccaggagcggctcaaagaagatacgtcttttgggggcaacctcgggcgagcagtcttccaggccaaaaagaggcttcttgaacctcttggtctggttgaggaagcggctaagacggctcctggaaagaagaggcctgtagagcagtctcctcaggaaccggactcctccgcgggtattggcaaatcgggtgcacagcccgctaaaaagagactcaatttcggtcagactggcgacacagagtcagtcccagaccctcaaccaatcggagaacctcccgcagccccctcaggtgtgggatctcttacaatggcttcaggtggtggcgcaccagtggcagacaataacgaaggtgccgatggagtgggtagttcctcgggaaattggcattgcgattcccaatggctgggggacagagtcatcaccaccagcacccgaacctgggccctgcccacctacaacaatcacctctacaagcaaatctccaacagcacatctggaggatcttcaaatgacaacgcctacctcggctacagcaccccctgggggtattttgacttcaacagattccactgccacttctcaccacgtgactggcagcgactcatcaacaacaactggggattccggcctaagcgactcaacttcaagctcttcaacattcaggtcaaagaggttacggacaacaatggagtcaagaccatcgccaataaccttaccagcacggtccaggtcttcacggactcagactatcagctcccgtacgtgctcgggtcggctcacgagggctgcctcccgccgttcccagcggacgttttcacgattcctcagtacgggtatctgacgcttaatgatggaagccaggccgtgggtcgttcgtccttttactgcctggaatatttcccgtcgcaaatgctaagaacgggtaacaacttccagttcagctacgagtttgagaacgtacctttccatagcagctacgctcacagccaaagcctggaccgactaatgaatccactcatcgaccaatacttgtactatctctcaaagactattaacggttctggacagaatcaacaaacgctaaaattcagtgtggccggacccagcaacatggctgtccagggaagaaactacatacctggacccagctaccgacaacaacgtgtctcaaccactgtgactcaaaacaacaacagcgaatttgcttggcctggagcttcttcttgggctctcaatggacgtaatagcttgatgaatcctggacctgctatggccagccacaaagaaggagaggaccgtttctttcctttgtctggatctttaatttttggcaaacaaggaactggaagagacaacgtggatgcggacaaagtcatgataaccaacgaagaagaaattaaaactactaacccggtagcaacggagtcctatggacaagtggccacaaaccaccagagtgcccaagcacaggcgcagaccggctgggttcaaaaccaaggaatacttccgggtatggtttggcaggacagagatgtgtacctgcaaggacccatttgggccaaaattcctcacacggacggcaactttcacccttctccgctgatgggagggtttggaatgaagcacccgcctcctcagatcctcatcaaaaacacacctgtacctgcggatcctccaacggccttcaacaaggacaagctgaactctttcatcacccagtattctactggccaagtcagcgtggagatcgagtgggagctgcagaaggaaaacagcaagcgctggaacccggagatccagtacacttccaactattacaagtctaataatgttgaatttgctgttaatactgaaggtgtatatagtgaaccccgccccattgggccccgatacctgactcgtaatttt

SEQ ID NO: 635 - DNA, 2208 bp, Artificial Sequence
  Synthetic polynucleotide
atggctgccgatggttatcttccagattggctcgaggacaaccttagtgaaggaattcgcgagtggtgggctttgaaacctggagcccctcaacccaaggcaaatcaacaacatcaagacaacgctcgaggtcttgtgcttccgggttacaaataccttggacccggcaacggactcgacaagggggagccggtcaacgcagcagacgcggcggccctcgagcacaacaaggcctacgaccagcagctcaaggccggagacaacccgtacctcaagtgcaaccacgccgacgccgagttccaggagcggctcaaagaagatacgtcttttgggggcaacctcgggcgagcagtcttccaggccaaaaagaggcttcttgaacctcttggtctggttgaggaagcggctaagacggctcctggaaagaagaggcctgtagagcagtctcctcaggaaccggactcctccgcgggtattggcaaatcgggtgcacagcccgctaaaaagagactcaatttcggtcagactggcgacacagagtcagtcccagaccctcaaccaatcggagaacctcccgcagccccctcaggtgtgagatctcttacaatggcttcaggtggtggcgcaccagtggcagacaataacgaaggtgccgatggagtgggtagttcctcgggaaattggcattgcgattcccaatggctgggggacagagtcatcaccaccagcacccgaacctgggccctgcccacctacaacaatcacctctacaagcaaatctccaacagcacatctggaggatcttcaaatgacaacgcctacctcggctacagcaccccctgggggtattttgacttcaacagattccactgccacttctcaccacgtgactggcagcgactcatcaacaacaactggggattccggcctaagcgactcaacttcaagctcttcaacattcaggtcaaagaggttacggacaacaatggagtcaagaccatcgccaataaccttaccagcacggtccaggtcttcacggactcagactatcagctcccgtacgtgctcgggtcggctcacgagggctgcctcccgccgttcccagcggacgttttcatgattcctcagtacgggtatctgacgcttaatgatggaagccaggccgtgggtcgttcgtccttttactgcctggaatatttcccgtcgcaaatgctaagaacgggtaacaacttccagttcagctacgagtttgagaacgtacctttccatagcagctacgctcacagccaaagcctggaccgactaatgaatccactcatcgaccaatacttgtactatctctcaaagactattaacggttctggacagaatcaacaaacgctaaaattcagtgtggccggacccagcaacatggctgtccagggaagaaactacatacctggacccagctaccgacaacaacgtgtctcaaccactgtgactcaaaacaacaacagcgaatttgcttggcctggagcttcttcttgggctctcaatggacgtaatagcttgatgaatcctggacctgctatggccagccacaaagaaggagaggaccgtttctttcctttgtctggatctttaatttttggcaaacaaggaactggaagagacaacgtggatgcggacaaagtcatgataaccaacgaagaagaaattaaaactactaacccggtagcaacggagtcctatggacaagtggccacaaaccaccagagtgcccaagcacaggcgcagaccggctgggttcaaaaccaaggaatacttccgggtatggtttggcaggacagagatgtgtacctgcaaggacccatttgggccaaaattcctcacacggacggcaactttcacccttctccgctgatgggagggtttggaatgaagcacccgcctcctcagatcctcatcaaaaacacacctgtacctgcggatcctccaacggccttcaacaaggacaagctgaactctttcatcacccagtattctactggccaagtcagcgtggagatcgagtgggagctgcagaaggaaaacagcaagcgctggaacccggagatccagtacacttccaactattacaagtctaataatgttgaatttgctgttaatactgaaggtgtatatagtgaaccccgccccattggcaccagatacctgactcgtaatctg

SEQ ID NO: 636 - DNA, 2208 bp, Artificial Sequence
  Synthetic polynucleotide
atggctgccgatggttatcttccagattggctcgaggacaaccttagtgaaggaattcgcgagtggtgggctttgaaacctggagcccctcaacccaaggcaaatcaacaacatcaagacaacgctcgaggtcttgtgcttccgggttacaaataccttggacccggcaacggactcgacaagggggagccggtcaacgcagcagacgcggcggccctcgagcacgacaaggcctacgaccagcagctcaaggccggagacaacccgtacctcaagtgcaaccacgccgacgccgagttccaggagcggctcaaagaagatacgtcttttgggggcaacctcgggcgagcagtcttccaggccaaaaagaggcttcttgaacctcttggtctggttgaggaagcggctaagacggctcctggaaagaagaggcctgtagagcagtctcctcaggaaccggactcctccgcgggtattggcaaatcgggtgcacagcccgctaaaaagagactcaatttcggtcagactggcgacacagagtcagtcccagaccctcaaccaatcggagaacctcccgcagccccctcaggtgtgggatctcttacaatggcttcaggcggtggcgcaccagtggcagacaataacgaaggtgccgatggagtgggtagttcctcgggaaattggcattgcgattcccaatggctgggggacagagtcatcaccaccagcacccgaacctgggccctgcccacctacaacaatcacctctacaagcaaatctccaacagcacatctggaggatcttcaaatgacaacgcctacctcggctacagcaccccctgggggtattttgacttcaacagattccactgccacttctcaccacgtgactggcagcgactcatcaacaacaactggggattccggcctaagcgactcaacttcgagctcttcaacattcaggtcaaagaggttacggacaacaatggagtcaagaccatcgccaataaccttaccagcacggtccaggtcttcacggactcagactatcagctcccgtacgtgctcgggtcggctcacgagggctgcctcccgccgttcccagcggacgttttcatgattcctcagtacgggtatctgacgcttaatgatggaagccaggccgtgggtcgttcgtccttttactgcctggaatatttcccgtcgcaaatgctaagaacgggtaacaacttccagtccagctacgagtttgagaacgtacctttccatagcagctacgctcacagccaaagcctggaccgactaatgaatccactcatcgaccaatacttgtactatctctcaaagactattaacggttctggacagaatcaacaaacgctaaaattcagtgtggccggacccagcaacatggctgtccagggaagaaactacatacctggacccagctaccgacaacaacgtgcctcaaccactgtgactcaaaacaacaacagcgaatttgcttggcctggagcttcttcttgggctctcaatggacgtaatagcttgatgaatcctggacctgctatggccagccacaaagaaggggaggaccgtttctttcctttgtctggatctttaatttttggcaaacaaggaactggaagagacaacgtggatgcggacaaagtcatgataaccaacgaagaagaaattaaaactactaacccggtagcaacggagtcctatggacaagtggccacaaaccaccagagtgcccaagcacaggcgcagaccggctgggttcaaaaccaaggaatacttccgggtatggtttggcaggacagagatgtgtacctgcaaggacccatttgggccaaaattcctcacacggacggcaactttcacccttctccgctgatgggagggtttggaatgaagcacccgcctcctcagatcctcatcaaaaacacacctgtacctgcggatcctccaacggccttcaacaaggacaagctgaactctttcatcacccagtattctactggccaagtcagcgtggagatcgagtgggagctgcagaaggaaaacagcaagcgctggaacccggagatccagtacacttccaactattacaagtctaataatgttgaatttgctgttaatactgaaggtgtatatagtgaaccccgccccattggcaccagatacctgactcgtaatctg

SEQ ID NO: 637 - DNA, 2208 bp, Artificial Sequence
  Synthetic polynucleotide
atggctgccgatggttatcttccagattggctcgaggacaaccttagtgaaggaattcgcgagtggtgggctttgaaacctggagcccctcaacccaaggcaaatcaacaacatcaagacaacgctcgaggtcttgtgcttccgggttacaaataccttggacccggcaacggactcgacaagggggagccggtcaacgcagcagacgcggcggccctcgagcacgacaaggcctacgaccagcagctcaaggccggagacaacccgtacctcaagtgcaaccacgccgacgccgagttccaggagcggctcaaagaagatacgtcttttgggggcaacctcgggcgagcagtcttccaggccaaaaagaggcttcttgaacctcttggtctggttgaggaagcggctaagacggctcctggaaagaagaggcctgtagagcagtctcctcaggaaccggactcctccgcgggtattggcaaatcgggtgcacagcccgctaaaaagagactcaatttcggtcagactggcgacacagagtcagtcccagaccctcaaccaatcggagaacctcccgcagcccccccaggtgtgggatctcttacaatggcttcaggtggtggcgcaccagtggcggacaataacgaaggtgccgatggagtgggtagttcctcgggaaattggcattgcgattcccaatggctgggggacagagtcatcaccaccagcacccgaacctgggccctgcccacctacaacaatcacctctacaagcaaatctccaacagcacatctggaggatcttcaaatgacaacgcctacctcggctacagcaccccctgggggtattttgacttcaacagattccactgccacttctcaccacgtgactggcagcgactcatcaacaacaactggggattccggcctaagcgactcaacttcaagctcttcaacattcaggtcaaagaggttacggacaacaatggagtcaagaccatcgccaataaccttaccagcacggtccaggtcttcacggactcagactatcagctcccgtacgtgctcgggtcggctcacgagggctgcctcccgccgttcccagcggacgttttcatgattcctcagtacgggtatctgacgcttaatgatggaagccaggccgtgggtcgttcgtccttttactgcctggaatatttcccgtcgcaaatgctaagaacgggtaacaacttccagttcagctacgagtttgagaacgtacctttccatagcagctacgctcacagccaaagcctggaccgactaatgaatccactcatcgaccaatacttgtactatctctcaaagactattagcggttctggacagaatcaacaaacgctaaaattcagtgtggccggacccagcaacatggctgtccagggaagaaactacatacctggacccagctaccgacaacaacgtgtctcaaccactgtgactcaaaacaacagcagcgaatttgcttggcctggagcttcttcttgggctctcaatggacgtaatagcttgatgaatcctggacctgctatggccagccacaaagaaggagaggaccgtttctttcctttgtctggatctttaatttttggcaaacaaggaactggaagagacaacgtggatgcggacaaagtcatgataaccaacgaagaagaaattaaaactactaacccggtagcaacggagtcctatggacaagtggccacaaaccaccagagtgcccaagcacaggcgcagaccggctgggttcaaaaccaaggaatactttcgggtatggtttggcaggacagagatgtgtacctgcaaggacccatttgggccaaaattcctcacacggacggcaactttcacccttctccgctgatgggagggtttggaatgaagcacccgcctcctcagatcctcatcaaaaacacacctgtacctgcggatcctccaacggccttcaacaaggacaagctgaactctttcatcacccagtattctactggccaagtcagcgtggagatcgagtgggagctgcagaaggaaaacagcaagcgctggaacccggagatccagtacacttccaactattacaagtctaataatgttgaatttgctgttaatactgaaggtgtatatagtgaaccccgccccattggcaccagatacctgactcgtaatctg

SEQ ID NO: 638 - DNA, 2208 bp, Artificial Sequence
  Synthetic polynucleotide
atggctgccgatggttatcttccagattggctcgaggacaaccttagtgaaggaattcgcgagtggtgggctttgaaacctggagcccctcaacccaaggcaaatcaacaacatcaagacaacgctcgaggtcttgtgcttccgggttacaaataccttggacccggcaacggactcgacaagggggagccggtcaacgcagcagacgcggcggccctcgagcacgacaaggcctacgaccagcagctcaaggccggagacaacccgtacctcaagtgcaaccacgccgacgccgagttccaggagcggctcaaagaagatacgtcttttgggggcaacctcgggcgagcagtcttccaggccaaaaagaggcttcttgaacctcttggtctggttgaggaagcggctaagacggctcctggaaagaagaggcctgtagagcagtctcctcaggaaccggactcctccgcgggtattggcaaatcgggtgcacagcccgctaaaaagagactcaatttcggtcagactggcgacacagagtcagtcccagaccctcaaccaatcggagaacctcccgcagccccctcaggtgtgggatctcttacaatggcttcaggtggtggcgcaccagtggcagacaataacgaaggtgccgatggagtgggtagttcctcgggaaattggcattgcgattcccaatggctgggggacagagtcatcaccaccagcacccgaacctgggccctgcccacctacaacaatcacctctacaagcaaatctccaacagcacatctggaggatcttcaaatgacaacgcctacctcggctacagcaccccctgggggtattttgacttcaacagattccactgccacttctcaccacgtgactggcagcgactcatcaacaacaactggggattccggcctaagcgactcaacttcaagctcttcaacattcaggtcaaagaggttacggacaacaatggagtcaagaccatcgccaataaccttaccagcacggtccaggtcttcacggactcagactatcagctcccgtacgtgctcgggtcggctcacgagggctgcctcccgccgttcccagcggacgttttcatgattcctcagtacgggtatctgacgcttaatgatggaagccaggccgtgggtcgttcgtccttttactgcctggaatatttcccgtcgcaaatgctaagaacgggtaacaacttccagttcagctacgagtttgagaacgtacctttccatagcagctacgctcacagccaaagcctggaccgactaatgaatccactcatcgaccaatacttgtactatctctcaaagactattaacggttctggacagaatcaacaaacgctaaaattcagtgtggccggacccagcaacatggctgtccagggaagaaactacatacctggacccagctaccgacaacaacgtgtctcaaccactgtgactcaaaacaacaacagcgaatttgcttggcctggagcttcttcttgggctctcaatggacgtaatagcttgatgaatcctggacctgctatggccagccacaaagaaggagaggaccgtttctttcctttgtctggatctttaatttttggcaaacaaggaactggaagagacaacgtggatgcggacaaagtcatgataaccaacgaagaagaaattaaaactactaacccggtagcaacggagtcctatggacaagtggccacaaaccaccagagtgcccaagcacaggcgcagaccggctgggttcaaaaccaaggaatacttccgggtatggtttggcaggacagagatgtgtacctgcaaggacccatttgggccaaaattcctcacacggacggcaactttcacccttctccgctgatgggagggtttggaatgaagcacccgcctcctcagatcctcatcaaaaacacacctgtacctgcggatcctccaacggccttcaacaaggacaagctgaactctttcatcacccagtattctactggccaagtcagcgtggagatcgagtgggagctgcagaaggaaaacagcaagcgctggaacccggagatccagtacacttccaactattacaagtctaataatgttgaatttgctgttaatactgaaggtgtatatagtgaaccccgccccattggcaccagatacctgactcgtaatctg

SEQ ID NO: 639 - DNA, 2208 bp, Artificial Sequence; identical to SEQ ID NO: 638
  Synthetic polynucleotide

SEQ ID NO: 640 - DNA, 2208 bp, Artificial Sequence
  Synthetic polynucleotide
atggctgccgatggttatcttccagattggctcgaggacaaccttagtgaaggaattcgcgagtggtgggctttgaaacctggagcccctcaacccaaggcaaatcaacaacatcaagacaacgctcgaggtcttgtgcttccgggttacaaataccttggacccggcaacggactcgacaagggggagccggtcaacgcagcagacgcggcggccctcgagcacgacaaggcctacgaccagcagctcaaggccggagacaacccgtacctcaagtgcaaccacgccgacgccgagttccaggagcggctcaaagaagatacgtcttttgggggcaacctcgggcgagcagtcttccaggccaaaaagaggcttcttgaacctcttggtctggttgaggaagcggctaagacggctcctggaaagaagaggcctgtagagcagtctcctcaggaaccggactcctccgcgggtattggcaaatcgggtgcacagcccgctaaaaagagactcaatttcggtcagactggcgacacagagtcagtcccagaccctcaaccaatcggagaacctcccgcagccccctcaggtgtgggatctcttacaatggcttcaggtggtggcgcaccagtggcagacaataacgaaggtgccgatggagtgggtagttcctcgggaaattggcattgcgattcccaatggctgggggacagagtcatcaccaccagcacccgaacctgggccctgcccacctacaacaatcacctctacaagcaaatctccaacagcacatctggaggatcttcaaatgacaacgcctacctcgactacagcaccccctgggggtattttgacttcaacagattccactgccacttctcaccacgtgactggcagcggctcatcaacaacaactggggattccggcctaagcgactcaacttcaagctcttcaacattcaggtcaaagaggttacggacaacaatggagtcaagaccatcgccaataaccttaccagcacggtccaggtcttcacggactcagactatcagctcccgtacgtgctcgggtcggctcacgagggctgcctcccgccgttcccagcggacgttttcatgattcctcagtacgggtatctgacgcttaatgatggaagccaggccgtgggtcgttcgtccttttactgcctggaatatttcccgtcgcaaatgctaagaacgggtaacaacttccagttcagctacgagtttgagaacgtacctttccatagcagctacgctcacagccaaagcctggaccgactaatgaatccactcatcgaccaatacttgtactatctctcaaagactattaacggttctggacagaatcaacaaacgctaaaattcagtgtggccggacccagcaacatggctgtccagggaagaaactacatacctggacccagctaccgacaacaacgtgtctcaaccactgtgactcaaaacaacaacagcgaatttgcttggcctggagcttcttcttgggctctcaatggacgtaatagcttgatgaatcctggacctgctatggccagccacaaagaaggagaggaccgtttctttcctttgtctggatctttaatttttggcaaacaaggaactggaagagacaacgtggatgcggacaaagtcatgataaccaacgaagaagaaattaaaactactaacccggtagcaacggagtcctatggacaagtggccacaaaccaccagagtgcccaagcacaggcgcagaccggctgggttcaaaaccaaggaatacttccgggtatggtttggcagggcagagatgtgtacctgcaaggacccatttgggccaaaattcctcacacggacggcaactttcacccttctccgctgatgggagggtttggaatgaagcacccgcctcctcagatcctcatcaaaaacacacctgtacctgcggatcctccaacggccttcaacaaggacaagctgaactctttcatcacccagtattctactggccaagtcagcgtggagatcgagtgggagctgcagaaggaaaacagcaagcgctggaacccggagatccagtacacttccaactattacaagtctaataatgttgaatttgctgttaatactgaaggtgtatatagtgaaccccgccccattggcaccagatacctgactcgtaatctg

SEQ ID NO: 641 - DNA, 2208 bp, Artificial Sequence; identical to SEQ ID NO: 638
  Synthetic polynucleotide

SEQ ID NO: 642 - DNA, 2208 bp, Artificial Sequence
  Synthetic polynucleotide
atggctgccgatggttatcctccagattggctcgaggacaaccttagtgaaggaattcgcgagtggtgggctttgaaacctggagcccctcaacccaaggcaaatcaacaacatcaagacaacgctcgaggtcttgtgcttccgggttacaaataccttggacccggcaacggactcgacaagggggagccggtcaacgcagcagacgcggcggccctcgagcacgacaaggcctacgaccagcagctcaaggccggggacaacccgcacctcaagtacaaccacgccgacgccgagttccaggagcggctcaaagaagatacgtcttttgggggcaacctcgggcgagcagtcttccaggccaaaaagaggcttcttgaacctcttggtctggttgaggaagcggctaagacggctcctggaaagaagaggcccgtagagcagtctcctcaggaaccggactcctccgcgggtattggcaaatcgggtgcacagcccgctaagaagagactcaatttcggtcagactggcgacactgagtcagtcccagaccctcaaccaatcggagaacctcccgcagccccctcaggtgtgggatctcttacaatggcttcaggtggtggcgcaccagtggcagacaataacgaaggtgccgatggagtgggtagttcctcgggaaattggcattgcgattcccaatggctgggggacagagtcatcaccaccagcacccgaacctgggccctgcccacctacaacaatcacctctacaagcaaatctccaacagcacatctggaggatcttcaaatgacaacgcctacttcggctacagcaccccctgggggtattttgacttcaacagattccactgccacttctcaccacgtgactggcagcgactcatcaacaacaactggggattccggcctaagcgactcaacttcaagctcttcaacattcaggtcaaagaggttacggacaacaatggagtcaagaccatcgccaataaccttaccagcacggtccaggtcttcacggactcagactatcagctcccgtacgtgctcgggtcggctcacgagggctgcctcccgccgttcccagcggacgttttcatgattcctcagtacgggtatctgacgcttaatgatggaagccaggccgtgggtcgttcgtccttttactgcctggaatatttcccgtcgcaaatgctaagaacgggtaacaacttccagttcagctacgagtttgagaacgtacctttccatagcagctacgctcacagccaaagcctggaccgactaatgaatccactcatcgaccaatacttgtactatctctcaaagactattaacggttctggacagaatcaacaaacgctaaaattcagtgtggccggacccagcaacatggctgtccagggaagaaactacatacctggacccagctaccgacaacaacgtgtctcaaccactgtgactcaaaacaacaacagcgaatttgcttggcctggagcttcttcttgggctctcaatggacgtaatagcttgatgaatcctggacctgctatggccagccacaaagaaggagaggaccgtttctttcctttgtctggatctttaatttttggcaaacaaggaactggaagagacaacgtggatgcggacaaagtcatgataaccaacgaagaagaaattaaaactactaacccggtagcaacggagtcctatggacaagtggccacaaaccaccagagtgcccaagcacaggcgcagaccggctgggttcaaaaccaaggaatacttccgggtatggtttggcaggacagagatgtgtacctgcaaggacccatttgggccaaaattcctcacacggacggcaactttcacccttctccgctgatgggagggtttggagtgaagcacccgcctcctcagatcctcatcaaaaacacacctgtacctgcggatcctccaacggccttcaacaaggacaggctgaactctttcatcacccagtattctactggccaagtcagcgtggagatcgagtgggagctgcagaaggaaaacagcaagcgctggaacccggagatccagtacacttccaactattacaagtctaataatgttgaatttgctgttaatactgaaggtgtatatagtgaaccccgccccattggcaccagatacctgactcgtaatctg

SEQ ID NO: 643 - DNA, 2208 bp, Artificial Sequence
  Synthetic polynucleotide
atggctgccgatggttatcttccagattggctcgaggacaaccttagtgaaggaattcgcgagtggtgggctttgaaacctggagcccctcaacccaaggcaaatcaacaacatcaagacaacgctcgaggtcttgtgcttccgggttacaaataccttggacccggcaacggactcgacaagggggagccggtcaacgcagcagacgcggcggccctcgagcacgacaaggcctacgaccagcagctcaaggccggagacaacccgtacctcaagtacaaccacgccgacgccgagttccaggagcggctcaaagaagatacgtcttttgggggcaacctcgggcgagcagtcttccaggccaaaaagaggcttcttgaacctcttggtctggttgaggaagcggctaagacggctcctggaaagaagaggcctgtagagcagtctcctcaggaaccggactcctccgcgggtattggcaaatcgggtgcacagcccgctaaaaagagactcaatttcggtcagactggcgacacagagtcagtcccagaccctcaaccaatcggagaacctcccgcagccccctcaggtgtgggatctcttacaatggcttcaggtggtggcgcaccagtggcggacaataacgaaggtgccgatggagtgggtagttcctcgggaaattggcattgcgattcccaatggctgggggacagagtcatcaccaccagcacccgaacctgggccctgcccacctacaacaatcacctctacaagcaaatctccaacagcacatctggaggatcttcaaatgacaacgcctacttcggctacagcaccccctgggggtattttgacttcaacagattccactgccacttctcaccacgtgactggcagcgactcatcaacaacaactggggattccggcctaagcgactcaacttcaagctcttcaacattcaggtcaaagaggttacggacaacaatggagtcaagaccatcgccaataaccttaccagcacggtccaggtcttcacggactcagactatcagctcccgtacgtgctcgggtcggctcacgagggctgcctcccgccgttcccagcggacgttttcatgattcctcagtacgggtatctgacgcttaatgatggaagccaggccgtgggtcgttcgtccttttactgcctggaatatttcccgtcgcaaatgctaagaacgggtaacaacttccagttcagctacgagtttgagaacgtacctttccatagcagctacgctcacagccaaagcctggaccgactaatgaatccactcatcgaccaatacttgtactatctctcaaagactattaacggttctggacagaatcaacaaacgctaaaattcagtgtggccggacccagcaacatggctgtccagggaagaaactacatacctggacccagctaccgacaacaacgtgtctcaaccactgtgactcaaaacaacaacagcgaatttgcttggcctggagcttcttcttgggctctcaatggacgtaatagtttgatgaatcctggacctgctatggccagccacaaagaaggagaggaccgtttctttcctttgtctggatctttaatttttggcaaacaaggaactggaagagacaacgtggatgcggacaaagtcatgataaccaacgaagaagaaattaaaactactaacccggtagcaacggagtcctatggacaagtggccacaaaccaccagagtgcccaagcacaggcgcagaccggctgggttcaaaaccaaggaatacttccgggtatggtttggcaggacagagatgtgtacctgcaaggacccatttgggccaaaattcctcacacggacggcaactttcacccttctccgctgatgggagggtttggagtgaagcacccgcctcctcagatcctcatcaaaaacacacctgtacctgcggatcctccaacggccttcaacaaggacaagctgaactctttcatcacccagtattctactggccaagtcagcgtggagatcgagtgggagctgcagaaggaaaacagcaagcgctggaacccggagatccagtacacttccaactattacaagtctaataatgttgaatttgctgttaatactgaaggtgtatatagtgaaccccgccccattggcaccagatacctgactcgtaatctg

SEQ ID NO: 644 - DNA, 2208 bp, Artificial Sequence
  Synthetic polynucleotide
atggctgccgatggttatcttccagattggctcgaggacaaccttagtgaaggaattcgcgagtggtgggctttgaaacctggagcccctcaacccaaggcaaatcaacaacatcaagacaacgctcgaggtcttgtgcttccgggttacaaataccttggacccggcaacggactcgacaagggggagccggtcaacgcagcagacgcggcggccctcgagcacgacaaggcctacgaccagcagctcaaggccggagacaacccgtacctcaagtacaaccacgccgacgccgagttccaggagcggctcaaagaagatacgtcttttgggggcaacctcgggcgagcagtcttccaggccaaaaagaggcttcttgaacctcttggtctggttgaggaagcggctaagacggctcctggaaagaagaggcctgtagagcagtctcctcaggaaccggactcctccgcgggtattggcaaatcgggtgcacagcccgctaaaaagagactcaatttcggtcagactggcgacacagagtcagtcccagaccctcaaccaatcggagaacctcccgcagccccctcaggtgtgggatctcttacaatggcttcaggtggtggcgcaccagtggcagacaataacgaaggtgccgatggagtgggtagttcctcgggaaattggcattgcgattcccaatggctgggggacagagtcatcaccaccagcacccgaacctgggccctgcccacttacaacaatcacctctacaagcaaatctccaacagcacatctggaggatcttcaaatgacaacgcctacttcggctacagcaccccctgggggtattttgacttcaacagattccactgccacttctcaccacgtgactggcagcgactcaccaacaacaactggggattccggcctaagcgactcaacttcaagctcttcaacattcaggtcaaagaggttacggacaacaatggagtcaagaccatcgccaataaccttaccagcacggtccaggtcttcacggactcagactatcagctcccgtacgtgctcgggtcggctcacgagggctgcctcccgccgttcccagcggacgttttcatgattcctcagtacgggtatctgacgcttaatgatggaagccaggccgtgggtcgttcgtccttttactgcctggaatatatcccgtcgcaaatgctaagaacgggtaacaacttccagttcagctacgagtttgagaacgtacctttccatagcagctacgctcacagccaaagcctggaccgactaatgaatccactcatcgaccaatacttgtactatctctcaaagactattaacggttctggacagaatcaacaaacgctaaaattcagtgtggccggacccagcaacatggctgtccagggaagaaactacatacctggacccagctaccgacaacaacgtgtctcaaccactgtgactcaaaacaacaacagcgaatttgcttggcctggagcttcttcttgggctctcaatggacgtaatagcttgatgaatcctggacctgctatggccagccacaaagaaggagaggaccgtttctttcctttgtctggatctttaatttttggcaaacaaggaactggaagagacaacgtggatgcggacaaagtcatgataaccaacgaagaagaaattaaaactactaacccggtagcaacggagtcctatggacaagtggccacaaaccaccagagtgcccaagcacaggcgcagaccggctgggttcaaaaccaaggaatacttccgggtatggtttggcaggacagagatgtgtacctgcaaggacccatttgggccaaaattcctcacacggacggcaactttcacccttctccgctgatgggagggtttggagtgaagcacccgcctcctcagatcctcatcaaaaacacacctgtacctgcggatcctccaacggccttcaacaaggacaagctgaactctttcatcacccagtattctactggccaagtcagcgtggagatcgagtgggagctgcagaaggaaaacagcaagcgctggaacccggagatccagtacacttccaactattacaagtctaataatgttgaatttgctgttaatactgaaggtgtatatagtgaaccccgccccattggcaccagatacctgactcgtaatctg

SEQ ID NO: 645 - DNA, 2208 bp, Artificial Sequence
  Synthetic polynucleotide
atggctgccgatggttatcttccagattggctcgaggacaaccttagtgaaggaattcgcgagtggtgggctttgaaacctggagcccctcaacccaaggcaaatcaacaacatcaagacaacgctcgaggtcttgtgcttccgggttacaaataccttggacccggcaacggactcgacaagggggagccggtcaacgcagcagacgcggcggccctcgagcacgacaaggcctacgaccagcagctcaaggccggagacaacccgtacctcaagtacaaccacgccgacgccgagttccaggagcggctcaaagaagatacgtcttttgggggcaacctcgggcgagcagtcttccaggccaaaaagaggcttcttgaacctcttggtctggttgaggaagcggctaagacggctcctggaaagaagaggcctgtagagcagtctcctcaggaaccggactcctccgcgggtattggcaaatcgggtgcacagcccgctaaaaagagactcaatttcggtcagactggcgacacagagtcagtcccagaccctcaaccaatcggagaacctcccgcagccccctcaggtgtgggatctcttacaatggcttcaggtggtggcgcaccagtggcagacaataacgaaggtgccgatggagtgggtagttcctcgggaaattggcattgcgattcccaatggctgggggacagagtcatcaccaccagcacccgaacctgggccctgcccacctacaacaatcacctctacaagcaaatctccaacagcacatctggaggatcttcaaatgacaacgcctacttcggctacagcaccccctgggggtattttgacttcaacagattccactgccacttctcaccacgtgactggcagcgactcatcaacaacaactggggattccggcctaagcgactcaacttcaagctcttcaacattcaggtcaaagaggttacggacaacaatggagtcaagaccatcgccaataaccttaccagcacggtccaggtcttcacggactcagactatcagctcccgtacgtgctcgggtcggctcacgagggctgcctcccgccgttcccagcggacgttttcatgattcctcagtacgggtatctgacgcttaatgatggaagccaggccgtgggtcgttcgtccttttactgcctggaatatttcccgtcgcaaatgctaagaacgggtaacaacttccagtttagctacgagtttgagaacgtacctttccatagcagctacgctcacagccaaagcctggaccgactaatgaatccactcatcgaccaatacttgtactatctctcaaagactattaacggttctggacagaatcaacaaacgctaaaattcagtgtggccggacccagcaacatggctgtccagggaagaaactacatacctggacccagctaccgacaacaacgtgtctcaaccactgtgactcaaaacaacaacagcgaatttgcttggcctggagcttcttcttgggctctcaatggacgtaatagcttgatgaatcctggacctgctatggccagccacaaagaaggagaggaccgtttctttcctttgtctggatctttaatttctggcaaacaaggaactggaagagacaacgtggatgcgaacaaagtcatgataaccaacgaagaagaaattaaaactactaacccggtagcaacggagtcctatggacaagtggccacaaaccaccagagtgcccaagcacaggcgcagaccggctgggttcaaaaccaaggaatacttccgggtatggtttggcaggacagagatgtgtacctgcaaggacccatttgggccaaaattcctcacacggacggcaactttcacccttctccgctgatgggagggtttgaaatgaagcacccgcctcctcagatcctcatcaaaaacacacctgtacctgcggatcctccaacggccttcaacaaggacaagctgaactctttcatcacccagtattctactggccaagtcagcgtggagatcgagtgggagctgcagaaggaaaacagcaagcgctggaacccggagatccagtacacttccaactattacaagtctaataatgttgaatttgctgttaatactgaaggtgtatatagtgaaccccgccccattggcaccagatacctgactcgtaatctg

SEQ ID NO: 646 - DNA, 2208 bp, Artificial Sequence
  Synthetic polynucleotide
atggctgccgatggttatcttccagattggctcgaggacaaccttagtgaaggaattcgcgagtggtgggctttgaaacctggagcccctcaacccaaggcaaatcaacaacatcaagacaacgctcgaggtcttgtgcttccgggttacaaataccttggacccggcaacggactcgacaagggggagccggtcaacgcagcagacgcggcggccctcgagcacgacaaggcctacgaccagcagctcaaggccggagacaacccgtacctcaagtacaaccacgccgacgccgagttccaggagcggctcaaagaagatacgtcttttgggggcaacctcgggcgagcagtcttccaggccaaaaagaggcttcttgaacctcttggtctggttgaggaagcggctaagacggctcctggaaagaagaggcctgtagagcagtctcctcaggaaccggactcctccgcgggtattggcaaatcgggtgcacagcccgctaaaaagagactcaatttcggtcagactggcgacacagagtcagtcccagaccctcaaccaatcggagaacctcccgcagccccctcaggtgtgggatctcttacaatagcttcaggtggtggcgcaccagtggcagacaataacgaaggtgccgatggagtgggtagttcctcgggaaattggcattgcgattcccaatggctgggggacagagtcatcaccaccagcacccgaacctgggccctgcccacctacaacaatcacctctacaagcgaatctccaacagcacatctggaggatcttcaaatgacaacgcctacttcggctacagcaccccctgggggtattttgacttcaacagattccactgccacttctcaccacgtgactggcagcgactcatcaacaacaactggggattccggcctaagcgactcaacttcaagcttttcaacattcgggtcaaagaggttacggacaacaatggagtcaagaccatcaccaataaccttaccagcacggtccaggtcttcacggactcagactatcagctcccgtacgtgcttgggtcggctcacgagggctgcctcccgccgttcccagcggacgttttcatgattcctcagtacgggtatctgacgcttaatgatggaagccaggccgtgggtcgttcgtccttttactgcctggaatatttcccgtcgcaaatgctaagaacgggtaacaacttccagttcagctacgagtttgagaacgtacctttccatagcagctacgctcacagccaaagcctggaccgactaatgaatccactcatcgaccaatacttgtactatctctcaaagactattaacggttctggacagaatcaacaaacgctaaaattcagtgtggccggacccagcaacatggctgtccagggaagaaactacatacctggacccagctaccgacaacaacgtgtctcaaccactgtgactcgaaacaacaacagcgaatttgcttggcctggagcttcttcttgggctctcaatggacgtaatagcttgatgaatcctggacctgctatggccagccacaaagaaggagaggaccgtttctttcctttgtctggatctttaatttttggcaaacaaggaactggaagagacaacgtggatgcggacaaagtcatgataaccaacgaagaagaaattaaaactactaacccggtagcaacggagtcctatggacaagtggccacaaaccaccagagtgcccaagcacaggcgcagaccggctgggttcaaaaccaaggaatacttccgggtatggtttggcaggacagagatgtgtacctgcaaggacccatttgggccaaaattcctcacacggacggcaactttcacccttctccgctgatgggagggtttggagtgaagcacccgcctcctcagatcctcatcaaaaacacacctgtacctgcggatcctccaacggccttcaacaaggacaagctgaactctttcatcacccagtattctactggccaagtcagcgtggagatcgagtgggagctgcagaaggaaaacagcaagcgctggaacccggagatccagtacacttccaactattacaagtctaataatgttgaatttgctgttaatactgaaggtgtatatagtgaaccccgccccattggcaccagatacctgactcgtaatctg

SEQ ID NO: 647 - DNA, 2208 bp, Artificial Sequence
  Synthetic polynucleotide
atggctgccgatggttatcttccagattggctcgaggacaaccttagtgaaggaattcgcgagtggtgggctttgaaacctggagcccctcaacccaaggcaaatcaacaacatcaagacaacgctcgaggtcttgtgcttccgggttacaaataccttggacccggcaacggactcgacaagggggagccggtcaacgcagcagacgcggcggccctcgagcacgacaaggcctacgaccagcagctcaaggccggagacaacccgtacctcaagtacaaccacgccgacgccgagttccaggagcggctcaaagaagatacgtcttttgggggcaacctcgggcgagcagtcttccaggccaaaaagaggcttcttgaacctcttggtctggttgaggaagcggctaagacggctcctggaaagaagaggcctgtagagcagtctcctcaggaaccggactcctccgcgggtattggcaaatcgggcgcacagcccgctaaaaagagactcaatttcggtcagactggcgacacagagccagtcccagaccctcaaccaatcggagaacctcccgcagccccctcaggtgtgggatctcttacaatggcttcaggtggtggcgcaccagtggcagacaataacgaaggtgccgatggagtgggtagttcctcgggaaattggcattgcgattcccaatggctgggggacagagtcatcaccaccagcacccgaacctgggccctgcccacctacaacaatcacctctacaagcaaatctccaacagcacatctggaggatcttcaaatgacaacgcctacttcggctacagcaccccctgggggtattttgacttcaacagattccactgccacttctcaccacgtgactggcagcgactcatcaacaacaactggggattccggcctaagcgactcaacttcaagctcttcaacattcaggtcaaagaggttacggacaacaatggagtcaagaccatcgccaataaccttaccagcacggtccaggtcttcacggactcagactatcagctcccgtacgtgctcgggtcggctcacgagggctgcctcccgccgttcccagcgggcgttttcatgattcctcagtacgggtatctgacgcttaatgatggaagccaggccgtgggtcgttcgtccttttactgcctggaatatttcccgtcgcaaatgctaagaacgggtaacaacttccagttcagctacgagtttgagaacgtacctttccatagcagctacgctcacagccaaagcctggaccgactaatgaatccactcatcgaccaatacttgtactatctctcaaagactattaacggttctggacagaatcaacaaacgctaaaattcagtgtggccggacccagcaacatggctgtccagggaagaaactacatacctggacccagctaccgacaacaacgtgtctcaaccactgcgactcaaaacaacaacagcgaatttgcttggcctggagcttcttcttgggctctcaatggacgtaatagcttgatgaatcctggacctgctatggccagccacaaagaaggagaggaccgtttctttcctttgtctggatctttaatttttggcaaacaaggaactggaagagacaacgtggatgcggacaaagtcatgataaccaacgaagaagaaattaaaactactaacccggtagcaacggagtcctatggacaagtggccacaaaccaccagagtgcccaagcacaggcgcagaccggctgggttcaaaaccaaggaatacttccgggtatggtttggcaggacagagatgtgtacctgcaaggacccatttgggccaaaattcctcacacggacggcaactttcacccttctccgctgatgggagggtttggaatgaagcacccgcctcctcagatcctcatcaaaaacacacctgtacctgcggatcctccaacggccttcaacaaggacaagctgaactctttcatcacccagtattctactggccaagtcagcgtggagatcgagtgggagctgcagaaggaaaacagcaagcgctggaacccggagatccagtacacttccaactattacaagtctaataatgttgaatttgctgttaatactgaaggtgtatatagtgaaccccgccccattggcaccagatacctgactcgtaatctg

SEQ ID NO: 648 - DNA, 2208 bp, Artificial Sequence
  Synthetic polynucleotide
atggctgccgatggttatcttccagattggctcgaggacaaccttagtgaaggaattcgcgagtggtgggctttgaaacctggagcccctcaacccaaggcaaatcaacaacatcaagacaacgctcgaggtcttgtgcttccgggttacaaataccttggacccggcaacggactcgacaagggggagccggtcaacgcagcagacgcggcggccctcgagcacgacaaggcctacgaccagcagctcaaggccggagacaacccgtacctcaagtacaaccacgccgacgccgggttccaggagcggctcaaagaagatacgtcttttgggggcaacctcgggcgagcagtcttccaggccaaaaagaggcttcttgaacctcttggtctggttgaggaagcggctaagacggctcctggaaagaagaggcctgtagagcagtctcctcaggaaccggactcctccgcgggtattggcaaatcgggtgcacagcccgctaaaaagagactcaatttcggtcagactggcgacacagagtcagtcccagtccctcaaccaatcggagaacctcccgcagccccctcaggtgtgggatctcttacaatggcttcaggtggtggcgcaccagtggcagacaataacgaaggtgccgatggagtgggtagttcctcgggaaattggcattgcgattcccaatggctgggggacagagtcatcaccaccagcacccgaacctgggccctgcccacctacaacaatcacctctacaagcaaatctccaacagcacatctggaggatcttcaaatgacaacgcctacttcggctacagcaccccctgggggtattttgacttcaacagattccactgccacttctcaccacgtgactggcagcgactcatcaacaacaactggggattccggcctaagcgactcaacttcaagctcttcaacattcaggtcaaagaggttacggacaacaatggagtcaagaccatcgccaataaccttaccagcacggtccaggtcttcacggactcagactatcagctcccgtacgtgctcgggtcggctcacgagggctgcctcccgccgttcccagcggacgttttcatgattcctcagtacgggtatctgacgcttaatgatggaagccaggccgtgggtcgttcgtccttttactgcctggaatatttcccgtcgcaaatgctaagaacgggtaacaacttccagttcagctacgagtttgagaacgtacctttccatagcagctacgctcacagccaaagcctggaccgactaatgaatccactcatcgaccaatacttgtactatctctcaaagactattaacggttctggacagaatcaacaaacgctaaaattcagtgtggccggacccagcaacatggctgtccagggaagaaactacatacctggacccagctaccgacaacaacgtgtctcaaccactgtgactcaaaacaacaacagcgaatttgcttggcctggagcttcttcttgggctctcaatggacgtaatagcttgatgaatcctggacctgctatggccagccacaaagaaggagaggaccgtttctttcctttgtctggatctttaatttttggcaaacaaggagctggaagagacaacgtggatgcggacaaagtcatgataaccaacgaagaagaaattaaaactactaacccggtagcaacggagtcctatggacaagtggccacaaaccaccagagtgcccaagcacaggcgcagaccggctgggttcaaaaccaaggaatacttccgggtatggtttggcaggacagagatgtgtacctgcaaggacccatttgggccaaaattcctcacacggacggcaactttcacccttctccgctgatgggagggtttggaatgaagcacccgcctcctcagatcctcatcaaaaacacacctgtacctgcggatcctccaacggccttcaacaaggacaagctgaactctttcatcacccagtattctactggccaagtcagcgtggagatcgagtgggagctgcagaaggaaaacagcaagcgctggaacccggagatccagtacacttccaactattacaagtctaataatgttgaatttgctgttaatactgaaggtgtatatagtgaaccccgccccattggcaccagatacctgactcgtaatctg

SEQ ID NO: 649 - DNA, 2208 bp, Artificial Sequence
  Synthetic polynucleotide
  modified_base (377)..(377): a, c, t, or g
  misc_feature (377)..(377): n is a, c, g, or t
atggctgccgatggttatcttccagattggctcgaggacaaccttagtgaaggaattcgcgagaggtgggctttgaaacctggagcccctcaacccaaggcaaatcaacaacatcaagacaacgctcgaggtcttgtgcttccgggttacaaataccttggacccggcaacggactcgacaagggggagccggtcaacgcagcagacgcggcggccctcgagcacgacaaggcctacgaccagcagctcaaggccggagacaacccgtacctcaagtacaaccacgccgacgccgagttccaggagcggctcaaagaagatacgtcttttgggggcaacctcgggcgagcagtcttccaggccaaaaagaggcttcntgaacctcttggtctggttgaggaagcggctaagacggctcctggaaagaagaggcctgtagagcagtctcctcaggaaccggactcctccgcgggtattggcaaatcgggtgcacagcccgctaaaaagagactcaatttcggtcagactggcgacacagagtcagtcccagaccctcaaccaatcggagaacctcccgcagccccctcaggtgtgggatctcttacaatggcttcaggtggtggcgcaccagtggcagacaataacgaaggtgccgatggagtgggtagttcctcggggaattggcattgcgattcccaatggctgggggacagagtcatcaccaccagcacccgaacctgggccctgcccacctacaacaatcacctctacaagcaaatctccaacagcacatctggaggatcttcaaatgacaacgcctacttcggctacagcaccccctgggggtattttgacttcaacagattccactgccacttctcaccacgtgactggcagcgactcatcaacaacaactggggattccggcctaagcgactcaacttcaagctcttcaacattcaggtcaaagaggttacggacaacaatggagtcaagaccatcgccaataaccttaccagcacggtccaggtcttcacggactcagactatcagctcccgtacgtgctcgggtcggctcacgagggctgcctcccgccgttcccagcggacgttttcatgattcctcagtacgggtatctgacgcttaatgatggaagccaggccgtgggtcgttcgtccttttactgcctggaatatttcccgtcgcaaatgctaagaacgggtaacaacttccagttcagctacgagtttgagaacgtacctttccatagcagctacgctcacagccaaagcccggaccgactaatgaatccactcatcgaccaatacttgtactatctctcaaagactattaacggttctggacagaatcaacaaacgctaaaattcagtgtggccggacccagcaacatggctgtccagggaagaaactacatacctggacccagctaccgacaacaacgtgtctcaaccactgtgactcaaaacaacaacagcgaatttgcttggcctggagcttcttcttgggctctcaatggacgtaatagcttgatgaatcctggacctgctatggccagccacaaagaaggagaggaccgtttctttcctttgtctggatctttaatttttggcaaacaaggaactggaagagacaacgtggatgcggacaaagtcatgataaccaacgaagaagaaattaaaactactaacccggtagcaacggagtcctatggacaagtggccacaaaccaccagagtgcccaagcacaggcgcagaccggctgggttcaaaaccaaggaatacttccgggtatggtttggcaggacagagatgtgtacctgcaaggacccatttgggccaaaattcctcacacggacggcaactttcacccttctccgctgatgggagggtttggagtgaagcacccgcctcctcagatcctcatcaaaaacacacctgtacctgcggatcctccaacggccttcaacaaggacaagctgaactctttcatcacccagtattctactggccaagtcagcgtggagatcgagtgggagctgcagaaggaaaacagcaagcgctggaacccggagatccagtacacttccaactattacaagtctaataatgttgaatttgctgttaatactgaaggtgtatatagtgaaccccgccccattggcaccagatacctgactcgtaatctg

SEQ ID NO: 650 - DNA, 2208 bp, Artificial Sequence
  Synthetic polynucleotide
atggctgccgatggttatcttccagattggctcgaggacaaccttagtgaaggaattcgcgagtggtgggctttgaaacctggagcccctcaacccaaggcaaatcaacaacatcaagacaacgctcgaggtcttgtgcttccgggttacaaataccttggacccggcaacggactcgacaagggggagccggtcaacgcagcagacgcggcggccctcgagcacgacaaggcctacgaccagcagctcaaggccggagacaacccgtacctcaagtacaaccacgccgacgccgagttccaggagcggctcaaagaagatacgtcttttgggggcaacctcgggcgagcagtcttccaggccaaaaagaggcttcttgaacctcttggtctggttgaggaagcggctaagacggctcctggaaagaagaggcctgtagagcagtctcctcaggaaccggactcctccgcgggtattggcaaatcgggtgcacagcccgctaaaaagagactcaatttcggtcagactggcgacacagagtcagtcccagaccctcaaccaatcggagaacctcccgcagccccctcaggtgtgggatctcttacaatggcttcaggtggtggcgcaccagtggcagacaataacgaaggtgccgatggagtgggtagttcctcgggaaattggcattgcgattcccaatggctgggggacagagtcatcaccaccagcacccgaacctgggccctgcccacctacaacaatcacctctacaagcaaatctccaacagcacatctggaggatcttcaaatgacaacgcctacctcggctacagcaccccctgggggtattttgacttcaacagattccactgccacttctcaccacgtgactggcagcgactcatcaacaacaactggggattccggcctaagcgactcaacttcaagctcttcaacattcaggtcaaagaggttacggacaacaatggagtcaagaccatcgccaataaccttaccagcacggtccaggtcttcacggactcagactatcagctcccgtacgtgctcgggtcggctcacgagggctgcctcccgccgttcccagcggacgttttcatgattcctcagtacgggtatctgacgcttaatgatggaagccaggccgtgggtcgttcgtccttttactgcctggaatatttcccgtcgcaaatgctaagaacgggtaacaacttccagttcagctacgagtttgagaacgtacctttccatagcagctacgctcacagccaaagcctggaccgactaatgaatccactcatcgaccaatacttgtactatctctcaaagactattaacggttctggacagaatcaacaaacgctaaaattcagtgtggccggacccagcaacatggctgtccagggaagaaactacatacctggacccagctaccgacaacaacgtgtctcaaccactgtgactcaaaacaacaacagcgaatttgcttggcctggagcttcttcttgggctctcaatggacgtaatagcttgatgaatcctggacctgctatggccagccacaaagaaggagaggaccgtttctttcctttgtctggatctttaatttttggcaaacaaggaactggaagagacaacgtggatgcggacaaagtcatgataaccaacgaagaagaaattaaaactactaacccggtagcaacggagtcctatggacaagtggccacaaaccaccagagtgcccaagcacaggcgcagaccggctgggttcaaaaccaaggaatacttccgggtatggtttggcaggacagagatgtgtacctgcaaggacccatttgggccaaaattcctcacacggacggcaactttcacccttctccgctgatgggagggtttggaatgaagcacccgcctcctcagatcctcatcaaaaacacacctgtacctgcggatcctccaacggccttcaacaaggacaagctgaactctttcatcacccagtattctactggccaagtcagcgtggagatcgagtgggagctgcagaaggaaaacagcaagcgctggaacccggagatccagtacacttccaactattacaagtctaataatgttgaatttgctgttaatactgaaggtgtatatagtgaaccccgccccattggcaccagatacctgactcgtaatctg

SEQ ID NO: 651 - DNA, 2208 bp, Artificial Sequence
  Synthetic polynucleotide
atggctgccgatggttatcttccagattggctcgaggacaaccttagtgaaggaattcgcgagtggtgggctttgaaacctggagcccctcaacccaaggcaaatcaacaacatcaagacaacgctcgaggtcttgtgcttccgggttacaaataccttggacccggcaacggactcgacaagggggagccggtcaacgcagcagacgcggcggccctcgagcacgacaaggcctacgaccagcagctcaaggccggagacaacccgtacctcaagtacaaccacgccgacgccgagttccaggagcggctcaaagaagatacgtcttttgggggcaacctcgggcgagcagtcttccaggccaaaaagaggcttcttgaacctcttggtctggttgaggaagcggctaagacggctcctggaaagaagaggcctgtagagcagtctcctcaggaaccggactcctccgcgggtattggcaaatcgggtgcacagcccgctaaaaagagactcaatttcggtcagactggcgacacagagtcagtcccagaccctcaaccaatcggagaacctcccgcagccccctcaggtgtgggatctcttacaatggcttcaggtggtggcgcaccagtggcagacaataacgaaggtgccgatggagtgggtagttcctcgggaaattggcattgcgattcccaatggctgggggacagagtcatcaccaccagcacccgaacctgggccctgcccacctacaacaatcacctctacaagcaaatctccaacagcacatctggaggatcttcaaatgacaacgcctacttcggctacagcaccccctgggggtattttgacttcaacagattccactgccacttctcaccacgtgactggcagcgactcatcaacaacaactggggattccggcctaagcgactcaacttcaagctcttcaacattcaggtcaaagaggttacggacaacaatggagtcaagaccatcgccaataaccttaccagcacggtccaggtcttcacggactcagactatcagctcccgtacgtgctcgggtcggctcacgagggctgcctcccgccgttcccagcggacgttttcatgattcctcagtacgggtatctgacgcttaatgatggaagccaggccgtgggtcgttcgtccttttactgcctggaatatttcccgtcgcaaatgctaagaacgggtaacaacttccagttcagctacgagtttgagaacgtacctttccatagcagctacgctcacagccagagcctggaccgactaatgaatccactcatcgaccaatacttgtactatctctcaaagactattaacggttctggacagaatcaacaaacgctaaaattcagtgtggccggacccagcaacatggctgtccagggaagaaactacatacctggacccagctaccgacaacaacgtgtctcaaccactgtgactcaaaacaacaacagcgaatttgcttggcctggagcttcttcttgggctctcaatggacgtaatagcttgatgaatcctggacctgctatggccagccacaaagaaggagaggaccgtttctttcctttgtctggatctttaatttttggcaaacaaggaactggaagagacaacgtggatgcggacaaagtcatgataaccaacgaagaagaaattaaaactactaacccggtagcaacggagtcctatggacaagtggccacaaaccaccagagtgcccaagcacaggcgcagaccggctgggttcaaaaccaaggaatacttccgggtatggtttggcaggacagagatgtgtacctgcaaggacccatttgggccaaaattcctcacacggacggcaactttcacccttctccgctgatgggagggtttggaatgaagcacccgcctcctcagatcctcatcaaaaacacacctgtacctgcggatcctccaacggccttcaacaaggacaagctggactctttcatcacccagtattctactggccaagtcagcgtggagatcgagtgggagctgcagaaggaaaacagcaagcgctggaacccggtgatccagtacacttccaactattacaagtctaataatgttgaatttgctgttaatactgaaggtgtatatagtgaaccccgccccattggcaccagatacctgactcgtaatctg

SEQ ID NO: 652 - DNA, 2208 bp, Artificial Sequence
  Synthetic polynucleotide
atggctgccgatggttatcttccagattggctcgaggacaacctctctgagggcattcgcgagtggtgggacttgaaacctggagccccgaagcccaaagccaaccagcaaaagcaggacgacggccggggtctggtgcttcctggctacaagtacctcggacccttcaacggactcgacaagggggagcccgtcaacgcggcggacgcagcggccctcgagcacgacaaggcctacgaccagcagctcaaagcgggtgacaatccgtacctgcggtataaccacgccgacgccgagtttcaggagcgtctgcaagaagatacgtcttttgggggcaacctcgggcgagcagtcttccaggccaagaagcgggttctcgaacctctcggtctggttgaggaaggcgctaagacggctcctggaaagaaacgtccggtagagcagtcgccacaagagccagactcctcctcgggcatcggcaagacaggccagcagcccgctaaaaagagactcaattttggtcagactggcgactcagagtcagtccccgatccacaacctctcggagaacctccagcaacccccgctgctgtggggcctactacaatggcttcaggcggtggcgcaccaatggcagacaataacgaaggcgtcgacggagtgggtaatgcctcaggaaattggcattgcgattccacatggctgggcgacagagtcatcaccaccagcacccgcacctgggccttgcccacctacaataaccacctctacaagcaaatctccagtgcttcaacgggggccagcaacgacaaccactacttcggctacagcaccccctgggggtattttgatttcaacagattccactgccacttttcaccacgtgactggcagcgactcatcaacaacaattggggattccggcccaagagactcaacttcaaactcttcaacatccaagtcaaggaggtcacgacgaatgatggcgttacaaccatcgctaataaccttaccagcacggttcaagtcttctcggactcggagtaccagcttccgtacgtcctcggctctgcgcaccagggctgcctccctccgttcccggcggacgtgttcatgattccgcaatacggctacctgacgctcaacaatggcagccaagccgtgggacgttcatccttttactgcctggaatatttcccttctcagatgctgagaacgggcaacaactttaccttcagctacacctttgaggaagtgcctttccacagcagctacgcgcacagccagagcctggaccggctgatgaatcctctcatcgaccaatacctgtattacctgaacagaactcaaaatcagtccggaagtgcccaaaacaaggacttgctgtttagccgtgggtctccagctggcatgtctgttcagcccaaaaactggctacctggaccctgttatcggcagcagcgcgtttctaaaacaaaaacagacaacaacaacagcaattttacctggactggtgcttcaaaatataacctcaatgggcgtgaatccatcatcaaccctggcactgctatggcctcacacaaagacgacgaagacaagttctttcccatgagcggtgtcatgatttttggaaaagagagcgccggagcttcaaacactgcattggacaatgtcatgattacagacgaagaggaaattaaagccactaaccctgtggccaccgaaagatttgggaccgtggcagtcaatttccagagcagcagcacagaccctgcgaccggagatgtgcatgctatgggagcattacctggcatggtgtggcaagatagagacgtgtacctgcagggtcccatttgggccaaaattcctcacacagatggacactttcacccgtctcctcttatgggcggctttggactcaagaacccgcctcctcagatcctcatcaaaaacacgcctgttcctgcgaatcctccggcggagttttcagccacaaagcttgcttcattcatcacccaatactccacaggacaagtgagtgtggaaattgaatgggagctgcagaaagaaaacagcaagcgctggaatcccgaagtgcagtacacatccaattatgcaaaatctgccaacgttgattttactgtggacaacaatggactttatactgagcctcgccccattggcacccgttaccttacccgtcccctg

SEQ ID NO: 653 - DNA, 2208 bp, Artificial Sequence
  Synthetic polynucleotide
atggctgccgatggttatcttccagattggctcgaggacaacctctctgagggcattcgcgagtggtgggacttgaaacctggagccccgaagcccaaagccaaccagcaaaagcaggacgacggccggggtctggtgcttcctggctacaagtacctcggacccttcaacggactcgacaagggggagcccgtcaacgcggcggacgcagcggccctcgagcacgacaaggcctacgaccagcagctcaaagcgggtgacaatccgtacctgcggtataaccacgccgacgccgagtttcaggagcgtctgcaagaagatacgtcttttgggggcaacctcgggcgagcagtcttccaggccaagaagcgggttctcgaacctctcggtctggttgaggaaggcgctaagacggctcctggaaagagacgtccggtagagcagtcgccacaagagccagactcctcctcgggcatcggcaagacaggccagcagcccgctaaaaagagactcaattttggtcagactggcgactcagagtcagtccccgatccacaacctctcggagaacctccagcaacccccgctgctgtgggacctactacaatggcttcaggcggtggcgcaccaatggcagacaataacgaaggcgccgacggagtgggtaatgcctcaggaaattggcattgcgattccacatggctgggcgacagagtcatcaccaccagcacccgcacctgggccttgcccacctacaataaccacctctacaagcaaatctccagtgcttcaacgggggccagcaacgacaaccactacttcggctacagcaccccctgggggtattttgatttcaacagattccactgccacttttcaccacgtgactggcagcgactcatcaacaacaattggggattccggcccaagagactcaacttcaaactcttcaacatccaagtcaaggaggtcacgacgaatgatggcgtcacaaccatcgctaataaccttaccagcacggttcaagtcttctcggactcggagtaccagcttccgtacgtcctcggctctgcgcaccagggctgcctccctccgttcccggcggacgtgttcatgattccgcaatacggctacctgacgctcaacaatggcagccaagccgtgggacgttcatccttttactgcctggaatatttcccttctcagatgctgagaacgggcaacaactttaccttcagctacacctttgaggaagtgcctttccacagcagctacgcgcacagccagagcctggaccggctgatgaatcctctcatcgaccaatacctgtattacctgaacagaactcaaaatcagtccggaagtgcccaaaacaaggacttgctgtttagccgtgggtctccagctggcatgtctgttcagcccaaaaactggctacctggaccctgttatcggcagcagcgcgtttctaaaacaaaaacagacaacaacaacagcaattttacctggactggtgcttcaaaatataacctcaatgggcgtgaatccatcatcaaccctggcactgctatggcctcacacaaagacgacgaagacaagttctttcccatgagcggtgtcatgatttttggaaaagagagcgccggagcttcaaacactgcattggacaatgtcatgattacagacgaagaggaaattaaagccactaaccctgtggccaccgaaagatttgggaccgtggcagtcaatttccagagcagcagcacagaccctgcgaccggagatgtgcatgctatgggagcattacctggcatggtgtggcaagatagagacgtgtacctgcagggtcccatttgggccaaaattcctcacacagatggacactttcacccgtctcctcttatgggcggctttggactcaagaacccgcctcctcagatcctcatcaaaaacacgcctgttcctgcgaatcctccggcggagttttcagctacaaagtttgcttcgttcatcacccaatactccacaggacaagtgagtgtggaaattgaatgggagctgcagaaagaaaacagcaagcgctggaatcccgaagtgcagtacacatccaattatgcaaaatctgccaacgttgattttactgtggacaacaatggactttatactgagcctcgccccattggcacccgttaccttacccgtcccctg

SEQ ID NO: 654 - DNA, 2208 bp, Artificial Sequence
  Synthetic polynucleotide
atggctgccgatggttatcttccagattggctcgaggacaacctctctgagggcattcgcgagtggtgggacttgaaacctggagccccgaagcccaaagccaaccagcaaaagcaggacgacggccggggtctggtgcttcctggctacaagtacctcggacccttcaacggactcgacaagggggagcccgtcaacgcggcggacgcagcggccctcgagcacgacaaggcctacgaccagcagctcaaagcgggtgacaatccgtacccgcggtataaccacgccgacgccgagtttcaggagcgtctgcaagaagatacgtcttttgggggcaacctcgggcgagcagtcttccaggccaagaagcgggttctcgaacctctcggtctggttggggaaggcgctaagacggctcctggaaagaaacgtccggtagagcagtcgccacaagagccagactcctcctcgggcatcggcaagacaggccagcagcccgctaaaaagagactcaattttggtcagactggcgactcagagtcagtccccgatccacaacctctcggagaacctccagcaacccccgctgctgtgggacctactacaatggcttcaggcggtggcgcaccaatggcagacaataacgaaggcgccgacggagtgggtaatgcctcaggaaattggcattgcgattccacatggctgggcgacagagtcatcaccaccagcacccgcacctgggccttgcccacctacaataaccacctctacaagcaaatctccagtgcttcaacgggggccagcaacgacaaccactacttcggctacagcaccccctgggggtattttgatttcaacagattccactgccacttttcaccacgtgactggcagcgactcatcaacaacaattggggattccggcccaagagactcaacttcaaactcttcaacatccaagtcaaggaggtcacgacgaatgatggcgtcacaaccatcgctaataaccttaccagcacggttcaagtcttctcggactcggagtaccagcttccgtacgtcctcggctctgcgcaccagggctgcctccctccgttcccggcggacgtgttcatgattccgcaatacggctacctgacgctcaacaatggcagccaagccgtgggacgttcatccttttactgcctggaatatttcccttctcagatgctgagaacgggcaacaactttaccttcagctacacctttgaggaagtgcctttccacagcagctacgcgcacagccagagcctggaccggctgatgaatcctcccatcgaccaatacctgtattacctgaacagaactcaaaatcagtccggaagtgcccaaaacaaggacttgctgtttagccgtgggtctccagctggcatgtctgttcagcccaaaaactggctacctggaccctgttatcggcagcagcgcgtttctaaaacaaaaacagacaacaacaacagcaattttacctggactggtgcttcaaaatataacctcaatgggcgtgaatccatcatcaaccctggcactgctatggcctcacacaaagacgacgaagacaagttctttcccatgagcggtgtcatgatttttggaaaagagagcgccggagcttcaaacactgcattggacaatgtcatgattacagacgaagaggaaattaaagccactaaccctgtggccaccgaaagatttgggaccgtggcagtcaatttccagagcagcagcacagaccctgcgaccggagatgtgcatgctatgggagcattacctggcatggtgtggcaagatagagacgtgtacctgcagggtcccatttgggccaaaattcctcacacagatggacactttcacccgtctcctcttatgggcggctttggactcaagaacccgcctcctcagatcctcatcaaaaacacgcctgttcctgcgaatcctccggcggagttttcagctacaaagtttgcttcattcatcacccaatactccacaggacaagtgagtgtggaaattgaatgggagctgcagaaagaaaacagcaagcgctggaatcccgaagtgcagtacacatccaattatgcaaaatctgccaacgttgattttactgtggacaacaatggactttatactgagcctcgccccattggcacccgttaccttacccgtcccctg

SEQ ID NO: 655 - DNA, 2208 bp, Artificial Sequence
  Synthetic polynucleotide
atggctgccgatggttatcttccagattggctcgaggacaacctctctgagggcattcgcgagtggtgggacttgaaacctggagccccgaagcccaaagccaaccagcaaaagcaggacgacggccggggtctggtgcttcctggctacaagtacctcggacccttcaacggactcgacaagggggagcccgtcaacgcggcggacgcagcggccctcgagcacgacaaggcctacgaccagcagctcaaagcgggtgacaatccgtacctgcggtataaccacgccgacgccgagtttcaggagcgtctgcaagaagatacgtcttttgggggcaacctcgggcgagcagtcttccaggccaagaagcgggttctcgaacctctcggtctggttgaggaaggcgctaagacggctcctggaaagaaacgtccggtagagcagtcgccacaagagccagactcctcctcgggcatcggcaagacaggccagcagcccgctaaaaagagactcaattttggtcagactggcgactcagagtcagtccccgatccacgacctctcggagaacctccagcaacccccgctgctgtgggacctactacaatggcttcaggcggtggcgcaccaatggcagacaataacgaaggcgccgacggagtgggtaatgcctcaggaaattggcattgcgattccacatggctgggcgacagagtcatcaccaccagcacccgcacctgggccttgcccacctacaataaccacctctacaagcaaatctccagtgcttcaacgggggccagcaacgacaaccactacttcggctacagcaccccctgggggtattttgatttcaacagattccactgccacttttcaccacgcgactggcagcgactcatcaacaacaattggggattccggcccaagagactcaacttcaaactcttcaacatccaagtcaaggaggtcacgacgaatgatggcgtcacaaccatcgctaataaccttaccagcacggttcaagtcttctcggactcggagtaccagcttccgtacgtcctcggctctgcgcaccagggctgcctccctccgttcccggcggacgtgttcatgattccgcaatacggctacctgacgctcaacaatggcagccaagccgtgggacgttcatccttttactgcctggaatatttcccttctcagatgctgagaacgggcaacaactttaccttcagctacacctttgaggaagtgcctttccacagcagctacgcgcacagccagagcctggaccggctgatgaatcctctcatcgaccaatacctgtattacctgaacagaactcaaaatcagtccggaagtgcccaaaacaaggacttgctgtttagccgtgggcctccagctggcatgtctgttcagcccaaaaactggctacctggaccctgttatcggcagcagcgcgtttctaaaacaaaaacagacaacaacaacagcaattttacctggactggtgcttcaaaatataacctcaatgggcgtgaatccatcatcaaccctggcactgctatggcctcacacaaagacgacgaagacaagttctttcccatgagcggtgtcatgatttttggaaaagagagcgccggagcttcaaacactgcattggacaatgtcatgattacggacgaagaggaaattaaagccactaaccctgtggccaccgaaagatttgggaccgtggcagtcaatttccagagcagcagcacagaccctgcgaccggagatgtgcatgctatgggagcattacctggcatggtgtggcaagatagagacgtgtacctgcagggtcccatttgggccaaaattcctcacacagatggacactttcacccgtctcctcttatgggcggctttggactcaagaacccgcctcctcagatcctcatcaaaaacacgcctgttcctgcgaatcctccggcggagttttcagctacaaagtttgcttcattcatcacccaatactccacaggacaagtgagtgtggaaattgaatgggagctgcagaaagaaaacagcaagcgctggaatcccgaagtgcagtacacatccaattatgcaaaatctgccaacgttgattttactgtggacaacaatggactttatactgagcctcgccccattggcacccgttaccttacccgtcccctg

SEQ ID NO: 656 - DNA, 2208 bp, Artificial Sequence
  Synthetic polynucleotide
atggctgccgatggttatcttccagattggctcgaggacaacctctctgagggcattcgcgagtggtgggacttgaaacctggagccccgaagcccaaagccaaccagcaaaagcaggacgacggccggggtctggtgcttcctggctacaagtacctcggacccttcaacggactcgacaagggggagcccgtcaacgcggcggacgcagcggccctcgagcacgacaaggcctacgaccagcagctcaaagcgggtgacaatccgtacctgcggtataaccacgccgacgccgagtttcaggagcgtctgcaagaagatacgtcttttgggggcaacctcgggcgagcagtcttccaggccaagaagcgggttctcgaacctctcggtctggttgaggaaggcgctaagacggctcctggaaagaaacgtccggtagagcagtcgccacaagagccagactcctcctcgggcatcggcaagacaggccagcagcccgctaaaaagagactcaattttggtcagactggcggctcagagtcagtccccgatccacaacctctcggagaacctccagcaacccccgctgctgtgggacctactacaatggcttcaggcggtggcgcaccaatggcagacaataacgaaggcgccgacggagtgggtaatgcctcaggaaattggcattgcgattccacatggctgggcgacagagtcatcaccaccagcacccgcacctgggccttgcccacctacaataaccacctctacaagcaaatctccagtgcttcaacgggggccagcaacgacaaccactacttcggctacagcaccccctgggggtattttgatttcaacagattccactgccacttttcaccacgtgactggcagcgactcatcaacaacaattggggattccggcccaagagactcaacttcaaactcttcaacatccaagtcaaggaggtcacgacgaatgatggcgtcacaaccatcgctaataaccttaccagcacggttcaagtcttctcggactcggagtaccagcttccgtacgtcctcggctctgcgcaccagggctgcctccctccgttcccggcggacgtgttcatgattccgcaatacggctacctgacgctcaacaatggcagccaagccgtgggacgttcatccttttactgcctggaatatttcccttctcagatgctgagaacgggcaacaactttaccttcagctacacctttgaggaagtgcctttccacagcagctacgcgcacagccagagcctggaccggctgatgaatcctcccatcgaccaatacctgtattacctgaacagaactcaaaatcagtccgggagtgcccaaaacaaggacttgctgtttagccgtgggtctccagctggcatgtctgttcagcccaaaaactggctacctggaccctgttatcggcagcagcgcgtttctaaaacaaaaacagacaacaacaacagcaattttacctggactggtgcttcaaaatataacctcaatgggcgtgaatccatcatcaaccctggcactgctatggcctcacacaaagacgacgaagacaagttctttcccatgagcggtgtcatgatttttggaaaagagagcgccggagcttcaaacactgcattggacaatgtcatgattacagacgaagaggaaattaaagccactaaccctgtggccaccgaaagatttgggaccgtggcagtcaatttccagagcagcagcacagaccctgcgaccggagatgtgcatgctatgggagcattacctggcatggtgtggcaagatagagacgtgtacctgcagggtcccatttgggccaaaattcctcacacagatggacactttcacccgtctcctcttatgggcggctttggactcaagaacccgcctcctcagatcctcatcaaaaacacgcctgttcctgcgaatcctccggcggagttttcagctacaaagtttgcttcattcatcacccaatactccacaggacaagtgagtgtggaaattgaatgggagctgcagaaagaaaacagcaagcgctggaatcccgaagtgcagtacacatccaattatgcaaaatctgccaacgttgactttactgtggacaacaatggactttatactgagcctcgccccattggcacccgttaccttacccgtcccctg

SEQ ID NO: 657 - DNA, 2208 bp, Artificial Sequence
  Synthetic polynucleotide
atggctgccgatggttatcttccagattggctcgaggacaacctctctgagggcattcgcgagtggtgggacttgaaacctggagccccgaagcccaaagccaaccagcaaaagcaggacgacggccggggtctggtgcttcctggctacaagtacctcggacccttcaacggactcgacaagggggagcccgtcaacgcggcggacgcagcggccctcgagcacgacaaggcctacgaccagcagctcaaagcgggtgacaatccgtacctgcggtataaccacgccgacgccgagtttcaagagcgtctgcaagaagatacgtcttttgggggcaacctcgggcgagcagtcttccaggccaagaagcgggttctcgaacctctcggtctggttgaggaaggcgctaagacggctcctggaaagaaacgtccggtagagcagtcgccacaagagccagactcctcctcgggcatcggcaagacaggccagcagcccgctaaaaagagactcaattttggtcagactggcgactcagagtcagtccccgatccgcaacctctcggagaacctccagcaacccccgctgctgtgggacctactacaatggcttcaggcggtggcgcaccaatggcagacaataacgaaggcgccgacggagtgggtaatgcctcaggaaattggcattgcgattccacatggctgggcgacagagtcatcaccaccagcacccgcacctgggccttgcccacctacaataaccacctctacaagcaaatctccagtgcttcaacgggggccagcaacgacaaccactacttcggctacagcaccccctgggggtattttgatttcaacagattccactgccacttttcaccacgtgactggcagcgactcatcaacaacaattggggattccggcccaagagactcaacttcaaactcttcaacatccaagtcaaggaggtcacgacgaatgatggcgtcacaaccatcgctaataaccttaccagcacggttcaagtcttctcggactcggagtaccagcttccgtacgtcctcggctctgcgcaccagggctgcctccctccgttcccggcggacgtgttcatgattccgcaatacggctacctgacgctcaacaatggcagccaagccgtgggacgttcatccttttactgcctggaatatttcccttctcagatgctgagaacgggcaacaactttaccttcagctacacctttgaggaagtgcctttccacagcagctacgcgcacagccagagcctggaccggctgatgaatcctctcatcgaccaatacctgtattacctgaacagaactcaaaatcagtccggaagtgcccaaaacaaggacttgctgtttagccgtgggtctccagctggcatgtctgttcagcccaaaaactggctacctggaccctgttatcggcagcagcgcgtttctaaaacaaaaacagacaacaacaacagcaattttacctggactggtgcttcaaaatataacctcaatgggcgtgaatccatcatcaaccctggcactgctgtggcctcacacaaagacgacgaagacaagttctttcccatgagcggtgtcatgatttttggaaaagagagcgccggagcttcaaacactgcattggacaatgtcatgattacagacgaagaggaaattaaagccactaaccctgtggccaccgaaagatttgggaccgtggcagtcaatttccagagcagcagcacagaccctgcgaccggagatgtgcatgctatgggagcattacctggcatggtgtggcaagatagagacgtgtacctgcagggtcccatttgggccaaaattcctcacacagatggacactttcacccgtctcctcttatgggcggctttggactcaagaacccgcctcctcagatcctcatcaaaaacacgcctgttcctgcgaatcctccggcggagttttcagctacaaagtttgcttcattcatcacccaatactccacaggacaagtgagtgtggaaattgaatgggagctgcagaaagaaaacagcaagcgctggaatcccgaagtgcagtacacatccaattatgcaaaatctgccaacgttgattttactgtggacaacaatggactttatactgagcctcgccccattggcacccgttaccttacccgtcccctg

SEQ ID NO: 658 - DNA, 2208 bp, Artificial Sequence
  Synthetic polynucleotide
atggctgccgatggttatcttccagattggctcgaggacaacctctctgagggcattcgcgagtggtgggacttgaaacctggagccccgaagcccaaagccaaccagcaaaagcaggacgacggccggggtctggtgcttcctggctacaagtacctcggacccttcaacggactcgacaagggggagcccgtcaacgcggcggacgcagcggccctcgagcacgacaaggcctacgaccagcagctcaaagcgggtgacaatccgtacctgcggtataaccacgccgacgccgagtttcaggagcgtctgcaagaagatacgtcttttgggggcaacctcgggcgagcagtcttccaggccaagaagcgggttctcgaacctctcggtctggttgaggaaggcgctaagacggctcctggaaagaaacgtccggtagagcagtcgccacaagagccagactcctcctcgggcatcggcaagacaggccagcagcccgctaaaaagagactcaattttggtcagactggcgactcagagtcagtccccgatccacaacctctcggagaacctccagcaacccccgctgctgtgggacctactacaatggcttcaggcggtggcgcaccaatggcagacaataacgaaggcgccgacggagtgggtaatgcctcaggaaattggcattgcgattccacatggctgggcgacagagtcatcaccaccagcacccgcacctgggccttgcccacctacaataaccacctctacaagcaaatctccagtgcttcaacgggggccagcaacgacaaccactacttcggctacagcaccccctgggggtattttgatttcaacagattccactgccacttttcaccacgtgactggcagcaactcatcaacaacaattggggattccggcccaagagactcaacttcaaactcttcaacatccaagtcaaggaggtcacgacgaatgatggcgtcacaaccatcgctaataaccttaccagcacggttcaagtcttctcggactcggagtaccagcttccgtacgtcctcggctctgcgcaccagggctgcctccctccgttcccggcggacgtgttcatgattccgcaatacggctacctgacgctcaacaatggcagccaagccgtgggacgttcatccttttactgcctggaatatttcccttctcagatgctgagaacgggcaacaactttaccttcagctacacctttgaggaagtgcctttccacagcagctacgcgcacagccagagcctggaccggctgatgaatcctctcatcgaccaatacctgtattacctgaacagaactcaaaatcagtccggaagtgcccaaaacaaggacttgctgtttagccgtgggtctccagctggcatgtctgttcagcccaaaaactggctacctggaccctgttatcggcagcagcgcgtttctaaaacaaaaacagacaacaacaacagcaattttacctggactggtgcttcaaaatataacctcaatgggcgtgaatccatcatcaaccctggcactgctatggcctcacacaaagacgacgaagacaagttctttcccatgagcggtgtcatgatttttggaaaagagagcgccggagcttcaaacactgcattggacaatgtcatgattacagacgaagaggaaattaaagccactaaccctgtggccaccgaaagatttgggaccgtggcagtcaatttccagagcaccagcacagaccctgcgaccggagatgtgcatgctatgggagcattacctggcatggtgtggcaagatagagacgtgtacctgcagggtcccatttgggccaaaattcctcacacagatggacactttcacccgtctcctcttatgggcggctttggactcaagaacccgcctcctcagatcctcatcaaaaacacgcctgttcctgcgaatcctccggcggagttttcagctacaaagtttgcttcattcatcacccaatactccacaggacaagtgagtgtggaaattgaatgggagctgcagaaagaaaacagcaagcgctggaatcccgaagtgcagtacacatccaattatgcaaaatctgccgacgttgattttactgtggacaacaatggactttatactgagcctcgccccattggcacccgttaccttacccgtcccctg

SEQ ID NO: 659 - DNA, 2208 bp, Artificial Sequence
  Synthetic polynucleotide
atggctgccgatggttatcttccagattggctcgaggacaacctctctgagggcattcgcgagtggtgggacttgaaacctggagccccgaagcccaaagccaaccagcaaaagcaggacgacggccggggtctggtgcttcctggctacaagtacctcggacccttcaacggactcgacaagggggagcccgtcaacgcggcggacgcagcggccctcgagcacgacaaggcctacgaccagcagctcaaagcgggtgacaatccgtacctgcggtataaccacgccgacgccgagtttcaagagcgtctgcaagaagatacgtcttttgggggcaacctcgggcgagcagtcttccaggccaagaagcgggttctcgaacctctcggtctggttgaggaaggcgctaagacggctcctggaaagaaacgtccggtagagcagtcgccacaagagccagactcctcctcgggcatcggcaagacaggccagcagcccgctaaaaagagactcaattttggtcagactggcgactcagagtcagtccccgatccgcaacctctcggagaacctccagcaacccccgctgctgtgggacctactacaatggcttcaggcggtggcgcaccaatggcagacaataacgaaggcgccgacggagtgggtaatgcctcaggaaattggcattgcgattccacatggctgggcgacagagtcatcaccaccagcacccgcacctgggccttgcccacctacaataaccacctctacaagcaaatctccagtgcttcaacgggggccagcaacgacaaccactacttcggctacagcaccccctgggggtattttgatttcaacagattccactgccacttttcaccacgtgactggcagcgactcatcaacaacaattggggattccggcccaagagactcaacttcaaactcttcaacatccaagtcaaggaggtcacgacgaatgatggcgtcacaaccatcgctaataaccttaccagcacggttcaagtcttctcggactcggagtaccagcctccgtacgtcctcggctctgcgcaccagggctgcctccctccgttcccggcggacgtgttcatgattccgcaatacggccacctgacgctcaacaatggcagccaagccgtgggacgttcatccttttactgcctggaatatttcccttctcagatgctgagaacgggcaacaactttaccttcagctacacctttgaggaagtgcctttccacagcagctacgcgcacagccagagcctggaccggctgacgaatcctctcatcgaccaatacctgtattacctgaacagaactcaaaatcagtccggaagtgcccaaaacaaggacttgctgtttagccgtgggtctccagctggcatgtctgttcagcccaaaaactggctacctggaccctgttatcggcagcagcgcgtttctaaaacaaaaacagacaacaacaacagcaattttacctggactggtgcttcaaaatataacctcaatgggcgtgaatccatcatcaaccctggcactgctatggcctcacacaaagacgacgaagacaagttctttcccatgagcggtgtcatgatttttggaaaagagagcgccggagcttcaaacactgcattggacaatgtcatgattacagacgaagaggaaattaaagccactaaccctgtggccaccgaaagatttgggaccgtggcagtcaatttccagagcagcagcacagaccctgcgaccggagatgtgcatgctatgggagcattacctggcatggtgtggcaagatagagacgtgtacctgcagggtcccatttgggccaaaattcctcacacagatggacactttcacccgtctcctcttatgggcggctttggactcaagaacccgcctcctcagatcctcatcaaaaacacgcctgttcctgcgaatcctccggcggagttttcagctacaaagtttgcttcattcatcacccaatactccacaggacaagtgagtgtggaaattgaatgggagctgcagaaagaaaacagcaagcgctggaatcccgaagtgcagtacacatccaattatgcaaaatctgccaacgttgattttactgtggacaacaatggactttatactgagcctcgccccattggcacccgttaccttacccgtcccctg

SEQ ID NO: 660 - DNA, 2208 bp, Artificial Sequence
  Synthetic polynucleotide
atggctgccgatggttatcttccagattggctcgaggacaacctctctgagggcattcgcgagtggtgggacttgaaacctggagccccgaagcccaaagccaaccagcaagagcaggacgacggccggggtctggtgcttcctggctacaagtacctcggacccttcaacggactcgacaagggggagcccgtcaacgcggcggacgcagcggccctcgagcacgacaaggcctacgaccagcagctcaaagcgggtgacaatccgtacctgcggtataaccacgccgacgccgagtttcaggagcgtctgcaagaagatacgtcttttgggggcaacctcgggcgagcagtcttccaggccaagaagcgggttctcgaacctctcggtctggttgaggaaggcgctaagacggctcctggaaagaaacgtccggtagagcagtcgccacaagagccagactcctcctcgggcatcggcaagacaggccagcagcccgctaaaaagagactcaattttggtcagactggcgactcagagtcagtccccgatccacaacctctcggagaacctccagcaacccccgctgctgtgggacctactacaatggcttcaggcggtggcgcaccaatggcagacaataacgaaggcgccgacggagtgggtaatgcctcaggaaattggcattgcgattccacatggctgggcgacagagtcatcaccaccagcacccgcacctgggccttgcccacctacaataaccacctctacaagcaaatctccagtgcttcaacgggggccagcaacgacaaccactacttcggctacagcaccccctgggggtattttgatttcaacagattccactgccacttttcaccacgtgactggcagcgactcatcaacaacaattggggattccggcccaagagactcaacttcaaactcttcaacatccaagtcaaggaggtcacgacgaatgatggcgtcacaaccatcgctaataaccttaccagcacggttcaagtcttctcggactcggagtaccagcttccgtacgtcctcggctctgcgcaccagggctgcctccctccgttcccggcggacgtgttcatgattccgcaatacggctacctgacgctcaacaatggcagccaagccgtgggacgttcatccttttactgcctggaatatttcccttctcagatgctgagaacgggcaacaactttaccttcagctacacctttgaggaagtgcctttccacagcagctacgcgcacagccagagcctggaccggctgatgaatcctctcatcgaccaatacctgtattacctgaacagaactcaaaatcagtccggaagtgcccaaaacaaggacttgctgtttagccgtgggtctccagctggcatgtctgttcagcccaaaaactggctacctggaccctgttatcggcagcagcgcgtttctaaaacaaaaacagacaacaacaacagcaattttacctggactggtgcttcaaaatataacctcaatgggcgtgaatccatcatcaaccctggcactgctatggcctcacacaaagacgacgaagacaagttctttcccatgagcggtgtcatgatttttggaaaagagagcgccggagcttcaaacactgcattggacaatgtcatgattacagacgaagaggaaattaaagccactaaccctgtggccaccgaaagatttgggaccgtggcagtcaatttccagagcagcagcacagaccctgcgaccggagatgtgcatgctacgggaacattacctggcatggtgtggcaagatagagacgtgtacctgcagggtcccatttgggccaaaattcctcacacagatggacactttcacccgtctcctcttatgggcggctttggactcaagaacccgcctcctcagatcctcatcaaaaccacgcctgttcctgcgaatcctccggcggagttttcagctacaaagtttgcttcattcatcacccagtactccacaggacaagtgagtgtggaaattgaatgggagctgcagaaagaaaacagcaagcgctggaatcccgaagtgcagtacacatccaattatgcaaaatctgccaacgttgattttactgtggacgacaatggactttatactgagcctcgccccattggcacccgttaccttacccgtcccctg

SEQ ID NO: 661 - DNA, 2208 bp, Artificial Sequence
  Synthetic polynucleotide
atggctgccgatggttatcttccagattggctcgaggacaacctctctgagggcattcgcgagtggtgggacttgaaacctggagccccgaagcccaaagccaaccagcaaaagcaggacgacggccggggtctggtgcttcctggctacaagtacctcggacccttcaacggactcgacaagggggagcccgtcaacgcggcggacgcagcggccctcgagcacgacaaggcctacgaccagcagctcaaagcgggtgacaatccgtacctgcggtataaccacgccgacgccgagtttcaggagcgtctgcaagaagatacgtcttttgggggcaacctcgggcgagcagtcttccaggccaagaagcgggttctcgaacctctcggtctggttgaggaaggcgctaagacggctcctggaaagaaacgtccggtagagcagtcgctacaagagccagactcctcctcgggcatcggcaagacaggccagcagcccgctaaaaagagactcaattttggtcagactggcgactcagagtcagtccccgatccacaacctctcggagaacctccagcaacccccgctgctgtgggacctactacaatggcttcaggcggtggcgcaccaatggcagacaataacgaaggcgccgacggagtgggtaatgcctcaggaaattggcattgcgattccacatggctgggcgacagagtcatcaccaccagcacccgcacctgggccttgcccacctacaataaccacctctacaagcaaatctccagtgcttcaacgggggccagcaacgacaaccactacttcggctacagcaccccctgggggtattttgatttcaacagattccactgccacttttcaccacgtgactggcagcgactcatcaacaacaattggggattccggcccaagagactcaacttcaaactcttcaacatccaagtcaaggaggtcacgacgaatgatggcgtcacaaccatcgctaataaccttaccagcacggttcaagtcttctcggactcggagtaccagcttccgtacgtcctcggctctgcgcaccagggctgcctccctccgttcccggcggacgtgttcatgattccgcaatacggctacctgacgctcaacaatggcagccaagccgtgggacgttcatccttttactgcctggaatatttcccttctcagatgctgagaacgggcaacaactttaccttcagctacacctttgaggaagtgcctttccacagcagctacgcgcacagccagagcctggaccggctgatgaatcctctcatcgaccaatacctgtattacctgaacagaactcaaaatcagtccggaagtgcccaaaacaaggacttgctgtttagccgtgggtctccagctggcatgtctgttcagcccaaaaactggctacctggaccctgttatcggcagcagcgcgtttctaaaacaaaaacagacaacgacaacagcaattttacctggactggtgcttcaaaatataacctcaatgggcgtgaatccatcatcaaccctggcactgctatggcctcacacaaagacgacgaagacaagttctttcccatgagcggtgtcatgatttttggaaaagagagcgccggagcttcaaacactgcattggacaatgtcatgattacagacgaagaggaaattaaagccactaaccctgtggccaccgaaagatttgggaccgtggcagtcaatttccagagcagcagcacagaccctgcgaccggagatgtgcatgctatgggagcattacctggcatggtgtggcaagatagagacgtgtacctgcagggtcccatttgggccaaaattcctcacacagatggacactttcacccgtctcctcttatgggcggctttggactcaagaacccgcctcctcagatcctcatcaaaaacacgcctgttcctgcgaatcctccggcggagttttcagctacaaagtttgcttcattcatcacccaatactccacaggacaagtgagtgtggaaattgaatgggagctgcagaaagaaaacagcaagcgctggaatcccgaagtgcagtacacatccaattatgcaaaatctgccaacgttgattttactgtggacaacaatggactttatactgagcctcgccccattggcacccgttaccttacccgtcccctg

SEQ ID NO: 662 - DNA, 2208 bp, Artificial Sequence
  Synthetic polynucleotide
atggctgccgatggttatcttccagattggctcgaggacaacctctctgagggcattcgcgagtggtgggacttgaaacctggagctccgaagcccaaagccaaccagcaaaagcaggacgacggccggggtctggtgcttcctggctacaagtacctcggacccttcaacggactcgacaagggggagcccgtcaacgcggcggacgcagcggccctcgagcacgacaaggcctacgaccagcagctcaaagcgggtgacaatccgtacctgcggtataaccacgccgacgccgagtttcaggagcgtctgcaagaagatacgtcttttgggggcaacctcgggcgagcagtcttccaggccaagaagcgggttctcgaacctctcggtctggttgaggaaggcgctaagacggctcctggaaagaaacgtccggtagagcagtcgccacaagagccagactcctcctcgggcatcggcaagacaggccagcagcccgctaaaaagagactcaattttggtcagactggcgactcagagtcagtccccgatccacaacctctcggagaacctccagcaacccccgctgctgtgggacctactacaatggcttcaggcggtggcgcaccaatggcagacaataacgaaggcgccgacggagtgggtaatgcctcaggaaattggcattgcgattccacatggctgggcgacagagtcatcaccaccagcacccgcacctgggccttgcccacctacaataaccacctctacaagcaaatctccagtgcttcaacgggggccagcaacgacaaccactacttcggctacagcaccccctgggggtattttgatttcaacagattccactgccacttttcaccacgtgactggcagcgactcatcaacaacaattggggattccggcccaagagactcaacttcaaactcttcaacatccaagtcaaggaggtcacgacgaatgatggcgtcacaaccatcgctaataaccttaccagcacggttcaagtcttctcggactcggagtaccagcttccgtacgtcctcggctctgcgcaccagggctgcctccctccgttcccggcggacgtgttcatgattccgcaatacggctacctgacgctcaacaatggcagccaagccgtgggacgttcatccttttactgcctggaatatttcccttctcagatgctgagaacgggcaacaactttaccttcagctacacctttgaggaagcgcctttccacagcagctacgcgcacagccagagcctggaccggctgatgaatcctctcatcgaccaatacctgtattacctgaacagaactcaaaatcagtccggaagtgcccaaaacaaggacttgctgtttagccgtgggtctccagctggcatgtctgttcagcccaaaaactggctacctggaccctgttatcggcagcagcgcgtttctaaaacaaaaacagacaacaacaacagcaattttacctggactggtgcttcaaaatataacctcaatgggcgtgaatccatcatcaaccctggcactgctatggcctcacacaaagacgacgaagacaagttctttcccatgagcggtgtcatgatttttggaaaagagagcgccggagcttcaaacactgcattggacaatgtcatgattacagacgaagaggaaattaaagccactaaccctgtggccaccgaaagatttgggaccgtggcagtcaatttccagagcagcagcacagaccctgcgaccggagatgtgcatgctatgggagcattacctggcatggtgtggcaagatagagacgtgtacctgcagggtcccatttgggccaaaattcctcacacagatggacactttcacccgtctcctcttatgggcggctttggactcaagaacccgcctcctcagatcctcatcaaaaacacgcctgttcctgcgaatcctccggcggagttttcagctacaaagtttgcttcattcatcacccaatactccacaggacaagtgagtgtggaaattgaatgggagctgcagaaagaaaacagcaagcgctggaatcccgaagtgcagtacacatccaattatgcgaaatctgccaacgttgattttactgtggacaacaatggactttatactgagcctcgccccgttggcacccgttaccttacccgtcccctg

SEQ ID NO: 663 - DNA, 2208 bp, Artificial Sequence
  Synthetic polynucleotide
atggctgccgatggttatcttccagattggctcgaggacaacctctctgagggcattcgcgagtggtgggacttgaaacctggagccccgaagcccaaagccaaccagcaaaagcaggacgacggccggggtctggtgcttcctggctacaagtacctcggacccttcaacggactcgacaagggggagcccgtcaacgcggcggacgcagcggccctcgagcacgacaaggcctacgaccagcagctcaaagcgggtgacaatccatacctgcggtataaccacgccgacgccgagtttcaggagcgtctgcaagaaaatacgtcttttgggggcaacctcgggcgagcagtcttccaggccaagaagcgggttctcgaacctctcggtctggttgaggaaggcgctaagacggctcctggaaagaaacgtccggtagagcagtcgccacaagagccagactcctcctcgggcatcggcaagacaggccagcagcccgctaaaaagagactcaattttggtcagactggcgactcagagtcagtccccgatccacaacctctcggagaacctccagcaacccccgctgctgtgggacctactacaatggcttcaggcggtggcgcaccaatggcagacaataacgaaggcgccgacggagtgggtaatgcctcaggaaattggcattgcgattccacatggctgggcgacagagtcatcaccaccagcacccgcacctgggccttgcccacctacaataaccacctctacaagcaaatctccagtgcttcaacgggggccagcaacgacaaccactacttcggctacagcaccccctgggggtattttgatttcaacagattccactgccactttccaccacgtgactggcagcgactcatcaacaacaattggggattccggcccaagagactcaacttcaaactcttcaacatccaagtcaaggaggtcacgtcgaatgatggcgtcacaaccatcgctaataaccttaccagcacggttcaagtcttctcggactcggagtaccagcttccgtacgtcctcggctctgcgcaccagggctgcctccctccgttcccggcggacgtgttcatgattccgcaatacggctacctgacgctcaacaatggcagccaagccgtgggacgttcatccttttactgcctggaatatttcccttctcagatgctgagaacgggcaacaactttaccttcagctacacctttgaggaagtgcctttccacagcagctacgcgcacagccagagcctggaccggctgatgaatcctctcatcgaccaatacctgtattacctgaacagaactcaaaatcagtccggaagtgcccaaaacaaggacttgctgtttagccgtgggtctccagctggcatgtctgttcagcccaaaaactggctacctggtccctgttatcggcagcagcgcgtttctaaaacaaaaacagacaacaacaacagcaattttacctggactggtgcttcaaaatataacctcaatgggcgtgaatccatcatcaaccctggcactgctatggcctcacacaaagacgacgaagacaagttctttcccatgagcggtgtcatgatttttggaaaagagagcgccggagcttcaaacactgcattggacaatgtcatgattacagacgaagaggaaattaaagccactaaccctgtggccaccgaaagatttgggaccgtggcagtcaatttccagagcagcagcacagaccctgcgaccggagatgtgcatgctatgggagcattacctggcatggtgtggcaagatagagacgtgtacctgcagggtcccatttgggccaaaattcctcacacagatggacactttcacccgtctcctcttatgggcggctttggactcaagaacccgcctcctcagatcctcatcaaaaacacgcctgttcctgcgaatcctccggcggagttttcagctacaaagtttgcttcattcatcacccaatactccacaggacaagtgagtgtggaaattgaatgggagctgcagaaagaaaacagcaagcgctggaatcccgaagtgcagtacacatccaattatgcaaaatctgccaacgttgattttactgtggacaacaatggactttatactgagcctcgccccattggcacccgttaccttacccgtcccctg

SEQ ID NO: 664 - DNA, 2208 bp, Artificial Sequence
  Synthetic polynucleotide
atggctgccgatggttatcttccagattggctcgaggacaacctctctgagggcattcgcgagtggtgggacttgaaacctggagccccgaagcccaaagccaaccagcaaaagcaggacgacggccggggtctggtgcttcctggctacaagtacctcggacccttcaacggactcgacaagggggagcccgtcaacgcggcggacgcagcggccctcgagcacgacaaggcctacgaccagcagctcaaagcgggtgacaatccgtacctgcggtataaccacgccgacgccgagtttcaggagcgtctgcaagaagatacgtcttttgggggcaacctcgggcgagcagtcttccaggccaagaagcgggttctcgaacctctcggtctggttgaggaaggcgctaagacggctcctggaaagaaacgtccggtagagcagtcgccacaagagccagactcctcctcgggcatcggcaagacaggccagcagcccgctaaaaagagactcaattttggtcagactggcgactcagagtcagtccccgatccacaacctctcggagaacctccagcaacccccgctgctgtgggacctactacaatggcttcaggcggtggcgcaccaatggcagacaataacgaaggcgccgacggagtgggtaatgcctcaggaaattggcattgcgattccacatggctgggcgacagagtcatcaccaccagcacccgcacctgggccttgcccacctacaataaccacctctacaagcaaatctccagtgcttcaacgggggccagcaacgacaaccactacttcggctacagcaccccctgggggtattttgatttcaacagattccactgccacttttcaccacgtgactggcagcgactcatcaacaacaattggggattccggcccaagagactcaacttcaaactcttcaacatccaagtcaaggaggtcacgacgaatgatggcgtcacaaccatcgctaataaccttaccagcacggttcaagtcttctcggactcggagtaccagcttccgtacgtcctcggctctgcgcaccagggctgcctccctccgttcccggcggacgtgttcatgattccgcaatacggctacctgacgctcaacaatggcagccaagccgtgggacgttcatccttttactgcctggaatatttcccttctcagatgctgagaacgggcaacaactttaccttcagctacacctttgaggaagtgcctttccacagcagctacgcgcacagccagagcctggaccggctgatgaatcctctcatcgaccaatacctgtattacctgaacagaactcaaaatcagtccggaagtgcccaaaacaaggacttgctgtttagccgtgggtctccagctggcacgtctgttcagcccaaaaactggctacctggaccctgttatcggcagcagcgcgtttctaaaacaaaaacagacaacaacaacagcaattttacctggactggtgcttcaaaatataacctcaatgggcgtgaatccatcatcaaccctggcactgctatggcctcacacaaagacgacgaagacaagttctttcccatgagcggtgtcatgatttttggaaaagagagcgccggagcttcaaacactgcattggacaatgtcatgattacagacgaagaggaaattaaagccactaaccctgtggccaccgaaagatttgggaccgtggcagtcaatttccagagcagcagcacagaccctgcgaccggagatgtgcatgctatgggagcattacctggcatggtgtggcaagatagagacgtgtacctgcagggtcccatttgggccaaaattcctcacacagatggacactttcacccgtctcctcttatgggcggctttggactcaagaacccgcctcctcagatcctcatcaaaaacacgcctgttcctgcgaatcctccggcggagttttcagctacaaagtttgcttcattcatcacccaatactccacaggacaagtgagtgtggaaattgaatgggagctgcagaaagaaaacagcaagcgctggaatcccgaagtgcagtacacatccaattatgcaaaatctgccaacgttgattttactgtggacaacaatggactttatactgggcctcgccccattggcacccgttaccttacccgtcccctg

SEQ ID NO: 665 - DNA, 2208 bp, Artificial Sequence
  Synthetic polynucleotide
atggctgccgatggttatcttccagattggctcgaggacaacctctctgagggcattcgcgagtggtgggacttgaaacctggagccccgaagcccaaagccaaccagcaaaagcaggacgacggccggggtctggtgcttcctggctacaagtacctcggacccttcaacggactcgacaagggggagcccgtcaacgcggcggacgcagcggccctcgagcacgacaaggcctacgaccagcagctcaaagcgggtgacaatccgtacctgcggtataaccacgccgacgccgagtttcaggagcgtctgcaagaagatacgtcttttgggggcaacctcgggcgagcagtcttccaggccaagaagcgggttctcgaacctctcggtctggttgaggaaggcgctaagacggctcctggaaagaaacgtccggtagagcagtcgccacaagagccagactcctcctcgggcatcggcaagacaggccagcagcccgctaaaaagagactcaattttggtcagactggcgactcagagtcagtccccgatccacaacctctcggagaacctccagcaacccccgctgctgtgggacctactacaatggcttcaggcggtggcgcaccaatggcagacaataacgaaggcgccgacggagtgggtaatgccccaggaaattggcattgcgactccacatggctgggcgacagagtcatcaccaccagcacccgcacctgggccttgcccacctacaataaccacctctacaagcaaatctccagtgcttcaacgggggccagcaacgacaaccactacttcggctacagcaccccctgggggtattttgatttcaacagattccactgccacttttcaccacgtgactggcagcgactcatcaacaacaattggggattccggcccaagagactcaacttcaaactcttcaacatccaagtcaaggaggtcacgacgaatgatggcgtcacaaccatcgctaataaccttaccagcacggttcaagtcttctcggactcggagtaccagcttccgtacgtcctcggctctgcgcaccagggctgcctccctccgttcccggcggacgtgttcatgattccgcaatacggctacctgacgctcaacaatggcagccaagccgtgggacgttcatccttttactgcctggaatatttcccttctcagatgctgagaacgggcaacaactttaccttcagctacacctttgaggaagtgcctttccacagcagctacgcgcacagccagagcctggaccggctgatgaatcctctcatcgaccaatacctgtattacctgaacagaactcaaaatcagtccggaagtgcccaaaacaaggacttgctgtttagccgtgggtctccagctggcatgtctgttcagcccaaaaactggctacctggaccctgttatcggcagcagcgcgtttctaaaacaaaaacagacaacaacaacagcaattttacctggactggtgcttcaaaatataacctcaatgggcgtgaatccatcatcaaccctggcacagctatggcctcacacaaagacgacgaagacaagttctttcccatgagcggtgtcatgatttttggaaaagagagcgccggagcttcaaacactgcattggacaatgtcatgattacaggcgaagaggaaattaaagccactaaccctgtggccaccgaaagatttgggaccgtggcagtcaatttccagagcagcagcacagaccctgcgaccggagatgtgcatgctatgggagcattacctggcatggtgtggcaagatagagacgtgtacctgcagggtcccatttgggccaaaattcctcacacagatggacactttcacccgtctcctcttatgggcggctttggactcaagaacccgcctcctcagatcctcatcaaaaacacgcctgttcctgcgaatcctccggcggagttttcagctacaaagtttgcttcattcatcacccaatactccacaggacaagtgagtgtggaaattgaatgggagctgcagaaagaaaacagcaagcgctggaatcccgaagtgcagtacacatccaattatgcaaaatctgccaacgttgattttactgtggacaacaatggactttatactgagcctcgccccattggcacccgttaccttacccgtcccctg

SEQ ID NO: 666 - DNA, 2208 bp, Artificial Sequence
  Synthetic polynucleotide
atggctgccgatggttatcttccagattggctcgaggacaacctctctgagggcattcgcgagtggtgggacttgaaacctggagccccgaagcccaaagccaaccagcaaaagcaggacgacggccggggtctggtgcttcctggctacaagtacctcggacccttcaacagactcgacaagggggagcccgtcaacgcggcggacgcagcggccctcgagcacgacaaggcctacgaccagcagctcaaagcgggtgacaatccgtacctgcggtataaccacgccgacgccgagtttcaggagcgtctgcaagaagatacgtcttttgggggcaacctcgggcgagcagtcttccaggccaagaagcgggttctcgaacctctcggtctggttgaggaaggcgctaagacggctcctggaaggaaacgtccggtagagcagtcgccacaagagccagactcctcctcgggcatcggcaagacaggccagcagcccgctaaaaagagactcaattttggtcagactggcgactcagagtcagtccccgatccacaacctctcggagaacctccagcaacccccgctgctgtgggacctactacaatggcttcaggcggtggcgcgccaatggcagacaataacgaaggcgccgacggagtgggtaatgcctcaggaaattggcattgcgattccacatggctgggcgacagagtcatcaccaccagcacccgcacctgggccttgcccacctacaataaccacctctacaagcaaatctccagtgcttcaacgggggccagcaacgacaaccactacttcggctacagcaccccctgggggtattttgatttcaacagattccactgccacttttcaccacgtgactggcagcgactcatcaacaacaattggggattccggcccaagagactcaacttcaaactcttcaacatccaagtcaaggaggtcacgacgaatgatggcgtcacaaccatcgctaataaccttaccagcacggttcaagtcttctcggactcggagtaccagcttccgtacgtcctcggctctgcgcaccagggctgcctccctccgttcccggcggacgtgttcatgattccgcaatacggctacctgacgctcaacaatggcggccaagccgtgggacgttcatccttttactgcctggaatatttcccttctcagatgctgagaacgggcaacaactttaccttcagctacacctttgaggaagtgcctttccacagcagctacgcgcacagccagagcctggaccggctgatgaatcctctcatcgaccaatacctgtattacctgaacagaactcaaaatcagtccggaagtgcccaaaacaaggacttgctgtttagccgtgggtctccagctggcatgtctgttcagcccaaaaactggctacctggaccctgttatcggcagcagcgcgtttctaaaacaaaaacagacaacaacaacagcaattttacctggactggtgcttcaaaatatagcctcaatgggcgtgaatccatcatcaaccctggcactgctatggcctcacacaaagacgacgaagacaagttctttcccatgggcggtgtcatgatttttggaaaagagagcgccggagcttcaaacactgcattggacaatgccatgattacagacgaagaggaaattaaagccactaaccctgtggccaccgaaagatttgggaccgtggcagtcaatttccagagcagcagcacagaccctgcgaccggagatgtgcatgctatgggagcattacctggcatggtgtggcaagatagagacgtgtacctgcagggtcccatttgggccaaaattcctcacacagatggacactttcacccgtctcctcttatgggcggctttggactcaagaacccgcctcctcagatcctcatcaaaaacacgcctgttcctgcgaatcctccggcggagttttcagctacaaagtttgcttcattcatcacccaatactccacaggacaagtgagtgtggaaattgaatgggagctgcagaaagaaaacagcaagcgctggaatcccgaagtgcagtacacatccaattatgcaaaatctgccaacgttgattttactgtggacaacaatggactttatactgagcctcgccccattggcacccgttaccttacccgtcccctg

SEQ ID NO: 667 - DNA, 2208 bp, Artificial Sequence
  Synthetic polynucleotide
atggctgccgatggttatcttccagattggctcgaggacaacctctctgagggcattcgcgagtggtgggacttgaaacctggagccccgaagcccaaagccaaccagcaaaagcaggacgacggccggggtctggtgcttcctggctacaagtacctcggacccttcaacggactcgacaagggggagcccgtcaacgcggcggacgcagcggccctcgagcacgacaaggcctacgaccagcagctcaaagcgggtgacaatccgtacctgcggtataaccacgccgacgccgagtttcaggagcgtctgcaagaagatacgtcttttgggggcaacctcgggcgagcagtcttccaggccaagaagcgggttctcgaacctctcggtctggttgaggaaggcgctaagacggctcctggaaagaaacgtccggtagagcagtcgccacaagagccagactcctcctcgggcatcggcaagacaggccagcagcccgctaaaaagagactcaattttggtcagactggcgactcagagtcagtccccgatccacaacctctcggagaacctccagcaacccccgctgctgtgggacctactacaatggcttcaggcggtggcgcaccaatggcagacaataacgaaggcgccgacggagtgggtaatgcctcaggaaattggcattgcgattccacatggctgggcggcagagtcatcaccaccagcacccgcacctgggccttgcccacctacaataaccacctctacaagcaaatctccagtgcttcaacgggggccagcaacgacaaccactacttcggctacagcaccccctgggggtattttgatttcaacagattccactgccacttttcaccacgtgactggcagcgactcatcaacaacaattggggattccggcccaagagactcaacttcaaactcttcaacatccaagtcaaggaggtcacgacgaatgatggcgtcacaaccatcgctaataaccttaccagcacggttcaagtcttctcggactcggagtaccagcttccgtacgtcctcggctctgcgcaccagggctgcctccctccgttcccggcggacgtgttcatgattccgcaatacggctacctgacgctcaacaatggcagccaagccgtgggacgttcatccttttactgcctggaatatttcccttctcagatgctgagaacgggcaacaactctaccttcagctacacctttgaggaagtgcctttccacagcagctacgcgcacagccagagcctggaccggctgatgaatcctctcatcgaccaatacctgtattacctgaacagaactcaaaatcagtccggaagtgcccaaaacaaggacttgctgtttagccgtgggtctccagctggcatgtctgttcagcccaaaaactggctacctggaccctgttatcggcagcagcgcgtttctaaaacaaaaacagacaacaacaacagcaattttacctggactggtgcttcaaaatataacctcaatgggcgtgaatccatcatcaaccctggcactgctatggcctcacacaaagacgacgaagacaagttctttcccatgagcggtgtcatgatttttggaaaagagagcgccggagcttcaaacactgcattggacaatgtcatgattacagacgaagaggaaattaaagccactaaccctgtggccaccgaaagatttgggaccgtggcagtcaatttccagagcagcagcacagaccctgcgaccggagatgtgcatgctatgggaacattacctggcatggtgtggcaagatagagacgtgtacctgcagggtcccatttgggccaaaattcctcacacagatggacactttcacccgtctcctcttatgggcggctttggactcaagaacccgcctcctcagatcctcatcaaaaacacgcctgttcctgcgaatcctccggcggagttttcagctacaaagtttgcttcattcatcacccaatactccacaggacaagtgagtgtggaaattgaatgggagctgcagaaagaaaacagcaagcgctggaatcccgaagtgcagtacacatccaattatgcaaaatctgccaacgttgattttactgtggacaacaatggactttatactgagcctcgccccattggcacccgttaccttacccgtcccctg

SEQ ID NO: 668 - DNA, 2208 bp, Artificial Sequence
  Synthetic polynucleotide
atggctgccgatggttatctcccagattggctcgaggacaacctctctgagggcattcgcgagtggtgggacttgaaacctggagccccgaagcccaaagccaaccagcaaaagcaggacgacggccggggtctggtgcttcctggctacaagtacctcggacccttcaacggactcgacaagggggagcccgtcagcgcggcggacgcagcggccctcgagcacgacaaggcctacgaccagcagctcaaagcgggtgacaatccgtacctgcggtataaccacgccgacgccgagtttcaggagcgtctgcaagaagatacgtcttttgggggcaacctcgggcgagcagtcttccaggccaagaagcgggttctcgaacctctcggtctggttgaggaaggcgctaagacggctcctggaaagaaacgtccggtagagcagtcgccacaagagccagactcctcctcgggcatcggcaagacaggccagcagcccgctaaagagagactcaattttggtcagactggcgactcagagtcagtccccgatccacaacctctcggagaacctccagcaacccccgctgctgtgggacctactacaatggcttcaggcggtggcgcaccaatggcagacaataacgaaggcgccgacggagtgggtaatgcctcaggaaattggcattgcgattccacatggctgggcgacagagtcatcaccaccagcacccgcacctgggccttgcccacctacaataaccacctctacaagcaaatctccagtgcttcaacgggggccagcaacgacaaccactacttcggctacagcaccccctgggggtattttgatttcaacagattccactgccacttttcaccacgtgactggcagcgactcatcaacaacaattggggattccggcccaagagactcaacttcaaactcttcaacatccaagtcaaggaggtcacgacgaatgatggcgtcacaaccatcgccaataaccttaccagcacggttcaagtcttctcggactcggagtaccagcttccgtacgtcctcggctctgcgcaccagggctgcctccctccgttcccggcggacgtgttcatgattccgcaatacggctacctgacgctcaacaatggcagccaagccgtgggacgttcatccttttactgcctggaatatttcccttctcagatgctgagaacgggcaacaactttaccttcagctacacctttgaggaagtgcctttccacagcagctacgcgcacagccagagcctggaccggctgatgaatcctctcatcgaccaatacctgtattacctgaacagaactcaaaatcagtccggaagtgcccaaaacaaggacttgctgtttagccgtgggtctccagctggcatgtctgttcagcccaaaaactggctacctggaccctgttatcggcagcagcgcgtttctaaaacaaaaacagacaacaacaacagcaattttacctggactggtgcttcaaaatataacctcaatgggcgtgaatccatcatcaaccctggcactgctatggcctcacacaaagacgacgaagacaagttctttcccatgagcggtgtcatgatttttggaaaagagagcgccggagcttcaaacactgcattggacaatgtcatgattacagacgaagaggaaattaaagccactaaccctgtggccaccgaaagatttgggaccgtggcagtcaatttccagagcagcagcacagaccctgcgaccggagatgtgcatgctatgggagcattacctggcatggtgtggcaagatagagacgtgtacctgcagggtcccatttgggccaaaattcctcacacagatggacactttcacccgtctcctcttatgggcggctttggactcaagaacccgcctcctcagatcctcatcaaaaacacgcctgttcctgcgaatcctccggcggagttttcagctacaaagtttgcttcattcatcacccaatactccacaggacaagtgagtgtggaaattgaatgggagctgcagaaagaaaacagcaagcgctggaatcccgaagtgcagtacacatccaattatgcaaaatctgccaacgttgattttactgtggacaacaatggactttatactgagcctcgccccattggcacccgttaccttacccgtcccctg

SEQ ID NO: 669 - DNA, 2208 bp, Artificial Sequence
  Synthetic polynucleotide
atggctgccgatggttatcttccagattggctcgaggacaacctctctgagggcattcgcgagtggtgggacttgaaacctggagccccgaagcccaaagccaaccagcaaaagcaggacgacggccggggtctggtgcttcctggctacaagtacctcggacccttcaacggactcgacaagggggagcccgtcaacgcggcggacgcagcggccctcgagcacgacaaggcctacgaccagcagctcaaagcgggtgacaatccgtacctgcggtataaccacgccgacgccgagtttcaggagcgtctgcaagaagatacgtcttttgggggcaacctcgggcgagcagtcttccaggccaagaagcgggttctcgaacctctcggtctggttgaggaaggcgctaagacggctcctggaaagaaacgtccggtagagcagtcgccacaagagccagactcctcctcgggcatcggcaagacaggccagcagcccgctaaaaagagactcaattttggtcagactggcgactcagagtcagtccccgatccacaacctctcggagaacctccagcaacccccgctgctgtgggacctactacaatggcttcaggcggtggcgcaccaatggcagacaataacgaaggcgccgacggagtgggtaatgcctcaggaaattggcattgcgattccacatggctgggcgacagagtcatcaccaccagcacccgcacctgggccttgcccacctacaataaccacctctacaagcaaatctccagtgcttcaacgggggccagcaacgacaaccactacttcggctacagcaccccctgggggtattttgatttcaacagattccactgccacttttcaccacgtgactggcagcgactcatcaacaacaattggggattccggcccaagagactcaacttcaaactcttcaacatccaagtcaaggaggtcacgacgaatgatggcgtcacaaccatcgctaataaccttaccagcacggttcaagtcttctcggactcggagtaccagcttccgtacgtcctcggctctgcgcaccagggctgcctccctccgttcccggcggacgtgttcatgattccgcaatacggctacctgacgctcaacaatggcagccaagccgtgggacgttcatccttttactgcctggaatatttcccttctcagatgctgagaacgggcaacaactttaccttcagctacacctttgaggaagtgcctttccacagcagctacgcgcacagccagagcctggaccggctgatgaatcctctcatcgaccaatacctgtattacctgaacagaactcaaaatcagtccggaagtgcccaaaacaaggacttgctgtttagccgtgggtctccagctggcatgtctgttcagcccaaaaactggctacctggaccctgttatcggcagcagcgcgtttctaaaacaaaaacagacaacaacaacagcaattttacctggactggtgcttcaaaatataacctcaatgggcgtgaatccatcatcaaccctggcactgctatggcctcacacaaagacgacgaagacaagttctttcccatgagcggtgtcatgatttttggaaaagagagcgccggagcttcaaacactgcattggacaatgtcatgattacagacgaaggggaaattaaagccactaaccctgtggccaccgaaagatttgggaccgtggcagtcaatttccagagcagcagcacagaccctgcgaccggagatgtgcatgctatgggagcattacctggcatggtgtggcaagatagagacgtgtacctgcagggtcccatttgggccaaaattcctcacacagatggacactttcacccgtctcctcttatgggcggctttggactcaagaacccgcctcctcagatcctcatcaaaaacacgcctgttcctgcgaatcctccggcggagttttcagctacaaagtttgcttcattcatcacccaatactccacaggacaagtgagtgtggaaattgaatgggagctgcagaaagaaaacagcaagcgctggaatcccgaagtgcagtacacatccaattatgcaaaatctgccaacgttgattttactgtggacaacaatggactttatactgagcctcgccccattggcacccgttaccttacccgtcccctg

SEQ ID NO: 670 - DNA, 2208 bp, Artificial Sequence
  Synthetic polynucleotide
atggctgccgatggttatcttccagattggctcgaggacaacctctctgagggcattcgcgagtggtgggacttgaaacctggagccccgaaacctaaagccaaccagcaaaagcaggacgacggccggggtctggtgcttcctggctacaagtacctcggacccttcaacggactcgacaagggggagcccgtcaacgcggcggacgcagcggccctcgagcacgacaaggcctacgaccagcagctcaaagcgggtgacaatccgtacctgcggtataaccacgccgacgccgagtttcaggagcgtctgcaagaagatacgtcttttgggggcaacctcgggcgagcagtcttccaggccaagaagcgggttctcgaaccttttggtctggttgaggaaggcgctaagacggctcctggaaagaaacgtccggtagagcagtcgccacaagagccagactcctcctcgggcatcggcaagacaggccagcagcccgctaaaaagagactcaattttggtcagactggcgactcagagtcagtccccgacccacaacctctcggagaacctccagcaacccccgctgctgtgggacctactacaatggcttcaggcggtggcgcaccaatggcagacaataacgaaggcgccgacggagtgggtaatgcctcaggaaattggcattgcgattccacatggctgggcgacagagtcatcaccaccagcacccgcacctgggccttgcccacctacaataaccacctctacaagcaaatctccagtgcttcaacgggggccagcaacgacaaccactacttcggctacagcaccccctgggggtattttgatttcaacagattccactgccacttttcaccacgtgactggcagcgactcatcaacaacaattggggattccggcccaagagactcaacttcaagctcttcaacatccaagtcaaggaggtcacgacgaacgatggcgtcacgaccatcgctaataaccttaccagcacggttcaagtcttctcggattcagagtaccaactgccgtacgtcctcggctctgcgcaccagggctgcctccctccgttcccggcggacgtgtttatgattccgcagtacggctacctaacgctcaacaatggcagccaggccgtgggacgttcatccttttactgcccggaatatttcccttctcagatgctgagaacgggcaacaactttaccttcagctacacctttgaggaagtgcctttccacagcagctacgcgcacagccagagcctggaccggctgatgaatcctctcatcgaccaatacctgtattacctgaacagaactcaaaatcagtccggaagtgcccaaaacaaggacttgctgtttagccgtgggtctccagctggcatgtctgttcagcccaaaaactggctacctggaccctgttatcggcagcagcgcgtttctaaaacaaaaacagacaacaacaacagcaattttacctggactggtgcttcaaaatataacctcaatgggcgtgaatccatcatcaaccctggcactgctatggcctcacacaaagacgacaaagacaagttctttcccatgagcggtgtcatgatttttggaaaagagagcgccggagcttcaaatactgcattggacaatgtcatgatcacagatgaagaggaaattaaagccactaaccctgtggccaccgaaagatttgggaccgtggcagtcaatttccagagcagcaacacagaccccgcgaccggagatgtgcatgttatgggagccttacctggcatggtgtggcaagacagagacgtatacctgcagggtcccatttgggccaaaattcctcacacggatggacactttcacccgtctcctctcatgggcggctttggacttaagcacccgcctcctcaaatcctcatcaaaaacacgcctgttcctgcgaatcctccggcagagttttcggctacaaagtttgcttcattcatcacccagtactccacaggacaagtgagtgtggaaattgaatgggagctgcagaaagaaaacagcaagcgctggaatcccgaagtgcagtacacatccaattatgcaaaatctgccaacgttgatttcactgtggacaacaatggactttatactgagcctcgccccattggcacccgttaccttacccgtcccttg

SEQ ID NO: 671 - DNA, 2208 bp, Artificial Sequence
  Synthetic polynucleotide
atggctgccgatggttatcttccagattggctcgaggacaacctctctgagggcattcgcgagtggtgggacttgaaacctggagccccgaaacctaaagccaaccagcaaaagcaggacgacggccggggtctggtgcttcctggctacaagtacctcggacccttcaacggactcgacaagggggagcccgtcaacgcggcggacgcagcggccctcgagcacgacaaggcctacgaccagcagctcaaagcgggtgacaatccgtacctgcggtataaccacgccgacgccgagtttcaggagcgtctacaagaagatacgtcttttgggggcaacctcgggcgagcagtcttccaggccaagaagcgggttctcgaaccttttggtctggttgaggaaggcgctaagacggctcctggaaagaaacgtccggtagagcagtcgccacaagagccagactcctcctcgggcatcggcaagacaggccagcagcccgctaaaaagagactcaattttggtcagactggcgactcagagtcagtccccgacccacaacctctcggagaacctccagcaacccccgctgctgtgggacctactacaatggcttcaggcggtggcgcaccaatggcagacaataacgaaggcgccgacggagtgggtaatgcctcaggaaattggcattgcgattccacatggctgggcgacagagtcatcaccaccagcacccgcacctgggccttgcccacctacaataaccacctctacaagcaaatctccagtgcttcaacgggggccagcaacgacaaccactacttcggctacagcaccccctgggggtattttgatttcaacagattccactgccacttttcaccacgtgactggcagcgactcatcaacaacaattggggattccggcccaagagactcaacttcaagctcttcaacatccaagtcaaggaggtcacgacgaacgatggcgtcacgaccatcgctaataaccttaccagcacggttcaagtcttctcggattcagagtaccaactgccgtacgtcctcggctctgcgcaccagggctgcctccctccgttcccggcggacgtgttcatgattccgcagtacggctacctaacgctcaacaatggcagccaggccgtgggacgttcatccttttactgcctggaatatttcccttctcagatgctgagaacgggcaacaactttaccttcagctacacctttgaggaagtgcctttccacagcagctacgcgcacagccagagcctggaccggctgatgaatcctctcatcgaccaatacctgtattacctgaacagaactcaaaatcagtccggaagtgcccaaaacaaggacttgctgtttagccgtgggtctccagctggcatgtctgttcagcccaaaaactggctacctggaccctgttatcggcagcagcgcgtttctaaaacaaaaacagacaacaacaacagcaattttacctggactggtgcttcaaaatataacctcaatgggcgtgaatccatcatcaaccctggcactgctatggcctcacacaaagacgacaaagacaagttctttcccatgagcggtgtcatgatttttggaaaagagagcgccggagcttcaaatactgcattggacaatgtcatgatcacagatgaagaggaaattaaagccactaaccctgtggccaccgaaagatttgggaccgtggcagtcaatttccagagcagcgacacagaccccgcgaccggagatgtgcatgttatgggagccttacctggcatggtgtggcaagacagagacgtatacctgcagggtcccatttgggccaaaattcctcacacggatggacactttcacccgtctcctctcatgggcggctttggacttaagcacccgcctcctcaaatcctcatcaaaaacacgcctgttcctgcgaatcctccggcagagttttcggctacaaagtttgcttcattcatcacccagtactccacaggacaagtgagtgtggaaattgaatgggagctgcagaaagaaaacagcaagcgctggaatcccgaagtgcagtacacatccaattatgcaaaatctgccaacgttgatttcactgtggacaacaatggactttatactgagcctcgccccattggcacccgttaccttacccgtcccttg

SEQ ID NO: 672 - DNA, 2208 bp, Artificial Sequence
  Synthetic polynucleotide
atggctgccgatggttatcttccagattggctcgaggacaacctctctgagggcattcgcgagtggtgggacttgaaacctggagccccgaaacctaaagccaaccagcaaaagcagggcgacggccggggtctggtgcttcctggctacaagtacctcggacccttcaacggactcgacaagggggagcccgtcaacgcggcggacgcagcggccctcgagcacgacaaggcctacgaccagcagctcaaagcgggtgacaatccgtacctgcggtataaccacgccgacgccgagtttcaggagcgtctgcaagaagatacgtcttttgggggcaacctcgggcgagcagtcttccaggccaagaagcgggttctcgaaccttttggtctggttgaggaaggcgctaagacggctcctggaaagaaacgtccggtagagcagtcgccacaagagccagactcctcctcgggcatcggcaagacaggccagcagcccgctaaaaagagactcaattttggtcagactggcgactcagagtcagtccccgacccacaacctctcggagaacctccagcaacccccgctgctgtgggacctactacaatggcttcaggcggtggcgcaccaatggcagacaataacgaaggcgccgacggagtgggtaatgcctcaggaaattggcattgcgattccacatggctgggcgacagagtcatcaccaccaacactcgcacctgggccttgcccacctacaataaccacctctacaagcaaatctccagtgcttcaacgggggccagcaacgacaaccactacttcggctacagcaccccctgggggtattttgatttcaacagattccactgccacttttcaccacgtgactggcagcgactcatcaacaacaattggggattccggcccaagagactcaacttcaagctcttcaacatccaagtcaaggaggtcacgacgaacgatggcgtcacgaccatcgctaataaccttaccagcacggttcaagtcttctcggattcagagtaccaactgccgtacgtcctcggctctgcgcaccagggctgcctccctccgttcccggcggacgtgttcatgattccgcagtacggctacctaacgctcaacaatggcagccaggccgtgggacgttcatccttttactgcctggaatatttcccttctcagatgctgagaacgggcaacaactttaccttcagctacacctttgaggaagtgcctttccacagcagttacgggcacagccagagcctggaccggctgatgaatcttctcatcgaccaatacctgtattacctgaacagaactcaaaatcagtccggaagtgcccaaaacaaggacttgctgtttagccgtgggtctccagctggcatgtttgttcagcccaaaaactggctacctggaccctgttatcggcagcagcgcgtttctaaaacaaaaacagacaacaacaacagcaattttacctggactggtgcttcaaaatataacctcaatgggcgtgaatccatcatcaaccctggcactgctatggcctcacacaaagacgacgaagacaagttctttcccatgagcggtgtcatgatttttggaaaagagagcgccggagcttcaaatactgcattggacaatgtcatgatcacagatgaagaggaaattaaagccactaaccctgtggccaccgaaagatttgggaccgtggcagtcaatttccagagcagcagcacagaccccgcgaccggagatgtgcatgttatgggagccttacctggcatggtgtggcaagacagagacgtatacctgcagggtcccatttgggccaaaattcctcacacggatggacactttcacccgtctcctctcatgggcggctttggacttaagcacccgcctcctcaaatcctcatcaaaaacacgcctgttcctgcgaatcctccggcagagttttcggctacaaagtttgcttcattcatcacccagtactccacaggacaagtgagtgtggaaattgaatgggagctgcagaaagaaaacagcaagcgctggaatcccgaagtgcagtacacatccaattatgcaaaatctgccaacgttgatttcactgtggacaacaatggactttatactgagcctcgccccattggcacccgttaccttacccgtcccttg

SEQ ID NO: 673 - DNA, 2208 bp, Artificial Sequence
  Synthetic polynucleotide
atggctgccgatggttatcttccagattggctcgaggacaacctctctgagggcattcgcgagtggtgggacttgaaacctggagccccgaaacctaaagccaaccagcaaaagcaggacgacggccggggtctggtgcttcctggctacaagtacctcggacccttcaacggactcgacaagggggagcccgtcaacgcggcggacgcagcggccctcgagcacgacaaggcctacgaccagcagctcaaagcgggtgacaatccgtacctgcggtataaccacgccgacgccgagtttcaggagcgtctgcaagaagatacgtcttttgggggcaacctcgggcgagcagtcttccaggccaagaagcgggttctcgaaccttttggtctggttgaggaaggcgctaagacggctcctggaaagaaacgtccggtagagcagtcgccacaagagccagactcctcctcgggcatcggcaagacaggccagcagcccgctaaaaagagactcaattttggtcagactggcgactcagagtcagtccccgacccacaacctctcggagaacctccagcaacccccgctgctgtgggacctactacaatggcttcaggcggtggcgcaccaatggcagacaataacgaaggcgccgacggagtgggtaatgcctcaggaaattggcattgcgattccacatggctgggcgacagagtcatcaccaccaacacccgcacctgggccttgcccacctacaataaccacctctacaagcaaatctccagtgcttcaacgggggccagcaacgacaaccactacttcggctacagcaccccctgggggtattttgatttcaacagattccactgccacttttcaccacgtgactggcagcgactcatcaacaacaattggggattccggcccaagagactcaacttcaagctcttcaacatccaagtcaaggaggtcacgacgaacgatggcgtcacgaccatcgctaataaccttaccagcacggttcaagtcttctcggattcagagtaccaactgccgtacgtcctcggctctgcgcaccagggctgcctccctccgttcccggcggacgtgttcatgattccgcagtacggctacctaatgctcaacaatggcagccaggccgtgggacgttcatccttttactgcctggaatatttcccttctcagatgctgagaacgggcaacaactttaccttcagctacacctttgaggaagtgcctttccacagcagctacgcgcacagccagagcctggaccggctgatgaatcctctcatcgaccaatacctgtattacctgaacagaactcaaaatcagtccggaagtgcccaaaacaaggacttgctgtttagccgtgggtctccagctggcatgtctgttcagcccaaaaactggctacctggaccctgttatcggcagcagcgcgtttctaaaacaaaaacagacaacaacaacagcaattttacctggactggtgcttcaaaatataacctcaatgggcgtgaatccatcatcaaccctggcactgctatggcctcacacaaagacgacgaagacaagttctttcccatgagcggtgtcatgatttttggaaaagagagcgccggagcttcaaatactgcattggacaatgtcatgatcacagatgaagaggaaattaaagccactaaccctgcggccaccgaaagatttgggaccgtggcagtcaatttccagagcagcagcacagaccccgcgaccggagatgtgcatgttatgggagccttacctggcatggtgtggcaagacagagacgtatacctgcagggtcccatttgggccaaaattcctcacacggatggacactttcacccgtctcctctcatgggcggctttggacttaagcacccgcctcctcaaatcctcatcaaaaacacgcctgttcctgcgaatcctccggcagagttttcggctacaaagtttgcttcattcatcacccagtactccacaggacaagtgagtgtggaaattgaatgggagctgcagaaagaaaacagcaagcgctggaatcccgaagtgcagtacacatccaattatgcaaaatctgccaacgttgatttcactgtggacaacaatggactttatactgagcctcgccccattggcacccgttaccttacccgtcccttg

SEQ ID NO: 674 - DNA, 2208 bp, Artificial Sequence
  Synthetic polynucleotide
atggctgccgatggttatcttccagattggctcgaggacaacctctctgagggcattcgcgagtggtgggacttgaaacctggagccccgaaacctaaagccaaccagcaaaagcaggacgacggccggggtctggtgcttcctggctacaagtacctcggacccttcaacggactcgacaagggggagcccgtcaacgcggcggacgcagcggccctcgagcacgacaaggcctacgaccagcagctcaaagcgggtgacaatccgtacctgcggtataaccacgccgacgccgagtttcaggagcgtctgcaagaagatacgtcttttgggggcaacctcgggcgagcagtcttccaggccaagaagcgggttctcgaaccttttggtctggttgaggaaggcgctaagacggctcctggaaagaaacgtccggtagagcagtcgccacaagagccagactcctcctcgggcatcggcaagacgggccagcagcccgctaaaaagagactcaattttggtcagactggcgactcagagtcagtccccgacccacaacctctcggagaacctccagcaacccccgctgctgtgggacctactacaatggcttcaggcggtggcgcaccaatggcagacaataacgaaggcgccgacggagtgggtaatgcctcaggaaattggcattgcgattccacatggctgggcgacagagtcatcaccaccagcacccgcacctgggccttgcccacctacaataaccacctctacaagcaaatctccagtgcttcaacgggggccagcaacgacaaccactacttcggctacagcaccccctgggggtattttgatttcaacagattccactgccacttttcaccacgtgactggcagcgactcatcaacaacaattggggattccggcccaagagactcaacttcaagctcttcaacatccaagtcaaggaggtcacgacgaacgatggcgtcacgaccatcgctaataaccttaccagcacggttcaagtcttctcggattcagagtaccaactgccgtacgtcctcggctctgcgcaccagggctgcctccctccgttcccggcggacgtgttcatgattccgcagtacggctacctaacgctcaacaatggcagccaggccgtgggacgttcatccttttactgcctggaatatttcccttctcagatgctgagaacgggcaacaactttaccttcagctacacctttgaggaagtgcctttccacagcagctacgcgcacagccagagcctggaccggctgatgaatcctctcatcgaccaatacctgtattacctgaacagaactcaaaatcagtccggaagtgcccaaaacaaggacttgctgtttagccgtgggtctccagctggcatgtccgttcagcccaaaaactggctacctggaccctgttatcggcagcagcgcgtttctaaaacaaaaacagacaacaacaacagcaattttacctggactggtgcttcaaaatataacctcaatgggcgtgaatccatcatcaaccctggcactgctatggcctcacacaaagacgacgaagacaagttctttcccatgagcggtgtcatgatttttggaaaagagagcgccggagcttcaaatactgcattggacaatgtcatgatcacagatgaagaggaaattaaagccactaaccctgtggccaccgaaagatttgggaccgtggcagtcaatttccagagcagcagcacagaccccgcgaccggagatgtgcatgttatgggagccttacctggcatggtgtggcaagacagagacgtatacctgcagggtcccatttgggccaaaattcctcacacggatggacactttcacccgtctcctctcatgggcggctttggacttaagcacccgcctcctcaaatcctcatcaaaaacacgcctgttcctgcgaatcctccggcagagttttcggctacaaagtttgcttcattcatcacccagtactccacaggacaagtgagtgtggaaattgaatgggagctgcagaaagaaaacagcaagcgctggaatcccgaagtgcagtacacatccaattatgcaaaatctgccaacgttgatttcactgtggacaacaatggactttatactgagcctcgccccattggcacccgttaccttacccgtcccttg

SEQ ID NO: 675 - DNA, 2208 bp, Artificial Sequence
  Synthetic polynucleotide
  modified_base (305)..(305): a, c, t, or g
  misc_feature (305)..(305): n is a, c, g, or t
atggctgccgatggttatcttccagattggctcgaggacaacctctctgagggcattcgcgagtggtgggacttgaaacctggagccccgaaacctaaagccaaccagcaaaagcaggacgacggccggggtctggtgcttcctggctacaagtacctcggacccttcaacggactcgacaagggggagcccgtcaacgcggcggacgcagcggccctcgagcacgacaaggcctacgaccagcagctcaaagcgggtgacaatccgtacctgcggtataaccacgccgacgccgagtttcaggngcgtctgcaagaagatacgtcttttgggggcaacctcgggcgagcagtcttccaggccaagaagcgggttctcgaaccttttggtctggttgaggaaggcgctaagacggctcctggaaagaaacgtccggtagagcagtcgccacaagagccagactcctcctcgggcatcggcaagacaggccagcagcccgctaaaaagagactcaattttggtcagactggcgactcagagtcagtccccgacccacaacctctcggagaacctccagcaacccccgctgctgtgggacctactacaatggcttcaggcggtggcgcaccaatggcagacaataacgaaggcgccgacggagtgggtaatgcctcaggaaattggcattgcgattccacatggctgggcggcagagtcatcaccaccagcacccgcacctgggccttgcccacctacaataaccacctctacaagcaaatctccagtgcttcaacgggggccagcaacgacaaccactacttcggccacagcaccccctgggggtattttgatttcaacagattccactgccacttttcaccacgtgactggcagcgactcatcaacaacaattggggattccggcccaagagactcaacttcaagctcttcaacatccaagtcaaggaggtcacgacgaacgatggcgtcacgaccatcgctaataaccttaccagcacggttcaagtcttctcggattcagagtaccaactgccgtacgtcctcggctctgcgcaccagggctgcctccctccgtccccggcggacgtgttcatgattccgcagtacggctacctaacactcaacaatggcagccaggccgtgggacgttcatccttttactgcctggaatatttcccttctcagatgctgagaacgggcaacaactttaccttcagctacacctttgaggaagtgcctttccacagcagctacgcgcacagccagagcctggaccggctgatgaatcctctcatcgaccaatacctgtattacctgaacagaactcaaaatcagtccggaagtgcccaaaacaaggacttgctgtttagccgtgggtctccagctggcatgtctgttcagcccaaaaactggctacctggaccctgttatcggcagcagcgcgtttctaaaacaaaaacagacaacaacaacagcaattttacctggactggtgcttcaaaatataacctcaatgggcgtgaatccatcatcaaccctggcactgctatggcctcacacaaagacgacaaagacaagttctttcccatgagcggtgtcatgatttttggaaaagagagcgccggagcttcaaatactgcattggacaatgtcatgatcacagatgaagaggaaattaaagccactaaccctgtggccaccgaaagatttgggaccgtggcagtcaatttccagagcagcaacacagaccccgcgaccggagatgtgcatgttatgggagccttacctggcatggtgtggcaagacagagacgtatacctgcagggtcccatttgggccaaaattcctcacacggatggacactttcacccgtctcctctcatgggcggctttggacttaagcacccgcctcctcaaatcctcatcaaaaacacgcctgttcctgcgaatcctccggcagagttttcggctacaaagtttgcttcattcatcacccagtactccacaggacaagtgagtgtggaaattgaatgggagctgcagaaagaaaacagcaagcgctggaatcccgaagtgcagtacacatccaattatgcaaaatctgccaacgttgatttcactgtggacaacaatggactttatactgagcctcgccccattggcacccgttaccttacccgtcccttg

SEQ ID NO: 676 - DNA, 2208 bp, Artificial Sequence
  Synthetic polynucleotide
atggctgccgatggttattttccagattggctcgaggacaacctttctgagggcattcgcgagtggtgggacttgaaacctggagccccgaaacctaaagccaaccagcaaaagcaggacgacggccggggtctggtgcttcctggctacaagtacctcggacccttcaacggactcgacaagggggagcccgtcaacgcggcggacgcagcggccctcgagcacgacaaggcctacgaccagcagctcaaagcgggtgacaatccgtacctgcggtataaccacgccgacgccgagtttcaggagcgtctgcaagaagatacgtcttttgggggcaacctcgggcgagcagtcttccaggccaagaagcgggttctcgaaccttttggtctggttgaggaaggcgctaagacggctcctggaaagaaacgtccggtagagcagtcgccacaagagccagactcctcctcgggcatcggcaggacaggccagcagcccgctaaaaagagactcaattttggtcagactggcgactcagagtcagtccccgacccacaacctctcggagaacctccagcgacccccgctgctgtgggacctactacaatggcttcaggcggtggcgcaccaatggcagacaataacgaaggtgccgacggagtgggtaatgcctcaggaaattggcattgcgattccacatggctgggcgacagagtcatcaccaccagcacccgcacctgggccttgcccacctacaataaccacctctacaagcaaatctccagtgcttcaacgggggccagcaacgacaaccactacttcggctacagcaccccctgggggtattttgatttcaacagattccactgccacttttcaccacgtgactggcagcgactcatcaacaacaattggggattccggcccaagagactcaacttcaagctcttcaacatccaagtcaaggaggtcacgacgaacgatggcgtcacgaccatcgctaataaccttaccagcacggttcaagtcttctcggattcagagtaccaactgccgtacgtcctcggctctgcgcaccagggctgcctccctccgttcccggcggacgtgttcatgattccgcagtacggctacctaacgctcaacaatggcagccaggccgtgggacgttcatccttttactgcctggaatatttcccttctcagatgctgagaacgggcaacaactttaccttcagctacacctttgaggaagtgcctttccacagcagctacgcgcacagccagagcctggaccggctgatgaatcctctcatcgaccaatacctgtattacctgaacagaactcaaaatcagtccggaagtgcccaaaacaaggacttgctgtttagccgtgggtctccagctggcatgtctgttcagcccaaaaactggctacctggaccctgttatcggcagcagcgcgtttctaaaacaaaaacagacaacaacaacagcaattttacctggactggtgcttcaaaatataacctcaatgggcgtgaatccatcatcaaccctggcactgctatggcctcacacaaagacgacgaagacaagttctttcccatgagcggtgtcatgatttttggaaaagagagcgccggagcttcaaatactgcattggacaatgtcatgatcacagatgaagaggaaattaaagccactaaccctgtggccaccgaaagatttgggaccgtggcagtcaatttccagagcagcagcccagaccccgcgaccggagatgtgcatgttatgggagccttacctggcatggtgtggcaagacagagacgtatacctgcagggtcccatttgggccaaaattcctcacacggatggacactttcacccgtctcctctcatgggcggctttggacttaagcacccgcctcctcaaatcctcatcaaaaacacgcctgttcctgcgaatcctccggcagagttttcggctacaaagtttgcttcattcatcacccagtactccacaggacaagtgagtgtggaaattgaatgggagctgcagaaagaaaacagcaagcgctggaatcccgaagtgcagtacacatccaattatgcaaaatctgccaacgttgatttcactgtggacaacaatggactttatagtgagcctcgccccattggcacccgttaccttacccgtcccttg

SEQ ID NO: 677 - DNA, 2208 bp, Artificial Sequence
  Synthetic polynucleotide
atggctgccgatggttatcttccagattggctcgaggacaacctctctgagggcattcgcgagtggtgggacttgaaacctggagccccgaaacctaaagccaaccagcaaaagcaggacgacggccggggtctggtgcttcctggctacaagtacctcggacccttcaacggactcgacaagggggagcccgtcaacgcggcggacgcagcggccctcgagcacgacaaggcctacgaccagcagctcaaagcgggtgacaatccgtacctgcggtataaccacgccgacgccgagtttcaggagcgtctgcaagaagatacgtcttttgggggcaacctcgggcgagcagtcttccaggccaagaagcgggttctcgaaccttttggtctggttgaggaaggcgctaagacggctcctggaaagaaacgtccggtagagcagtcgccacaagagccagactcctcctcgggcatcggcaagacaggccagcagcccgctaaaaagagactcaattttggtcagactggcgactcagagtcagtccccgacccacaacctctcggagaacctccagcaacccccgctgctgtgggacctactacaatggcttcaggcggtggcgcaccaatggcagacaataacgaaggcgccgacggagtgggtaatgcctcaggaaattggcattgcgattccacatggctgggcgacagagtcatcaccaccagcacccgcacctgggccttgcccacctacaataaccacctctacaagcaaacctccagtgcttcaacgggggccagcaacgacaaccactacttcggctacagcaccccctgggggtattttgatttcaacagattccactgccacttttcaccacgtgactggcagcgactcatcaacaacaattggggattccggcccaagagactcaacttcaagctcttcaacatccaagtcaaggaggtcacgacgaacgatggcgtcacgaccatcgctaataaccttaccagcacggttcaagtcttctcggattcagagtaccaactgccgtacgtcctcggctctgcgcaccagggctgcctccctccgttcccggcggacgtgttcatgattccgcagtacggctacctaacgctcaacaatggcagccaggccgtgggacgttcatccttttactgcctggaatatttcccttctcagatgctgagaacgggcaacaactttaccttcagctacacctttgaggaagtgcctttccacagcagctacgcgcacagccagagcctggaccggctgatgaatcctctcatcgaccaatacctgtattacctgaacagaactcaaaatcagtccggaagtgcccaaaacaaggacttgctgtttagccgtgggtctccagctggcatgtctgttcagcccaaaaactggctacctggaccctgttatcggcagcagcgcgtttctaaaacaaaaacagactacaacaacagcaattttacctggactggtgcttcaaaatataacctcaatgggcgtgaatccatcatcaaccctggcactgctatggcctcacacaaagacgacgaagacaagttctttcccatgagcggtgtcatgatttttggaaaagagagcgccggagcttcaaatactgcattggacaatgtcatgatcacagatgaagaggaaattaaagccactaaccctgtggccaccgaaagatttgggaccgtggcagtcaatttccagagcagcagcacagaccccgcgaccggagatgtgcatgttatgggagccttacctggcatggtgtggcaagacagagacgtatacctgcagggtcccatttgggccaaaattcctcacacggatggacactttcacccgtctcctctcatgggcggctttggacttaagcacccgcctcctcaaatcctcatcaaaaacacgcctgttcctgcgaatcctccggcagagttttcggctacaaagtttgcttcattcatcacccagtactccacaggacaagtgagtgtggaaattgaatgggagctgcagaaagaaaacagcaagcgctggaatcccgaagtgcagtacacatccaattatgcaaaatctgccaacgttgatttcactgtggacaacaatggactttatactgagcctcgccccattggcacccgttaccttacccgtcccttg

SEQ ID NO: 678 - DNA, 2208 bp, Artificial Sequence
  Synthetic polynucleotide
atggctgccgatggttatcctccagattggctcgaggacaacctctctgagggcattcgcgagtggtgggacttgaaacctggagtcccgaaacctaaagccaaccagcaaaagcaggacgacggccggggtctggtgcttcctggctacaagtacctcggacccttcaacggactcgacaagggggagcccgtcaacgcggcggacgcagcggccctcgagcacgacaaggcctacgaccagcagctcaaagcgggtgacaatccgtacctgcggtataaccacgccgacgccgagtttcaggagcgtctgcaagaagatacgtcttttgggggcaacctcgggcgagcagtcttccaggccaagaagcgggttctcgaaccttttggtctggttgaggaaggcgctaagacggctcctggaaagaaacgtccggtagagcagtcgccacaagagccagactcctcctcgggcatcggcaagacaggccagcagcccgctaaaaagagactcaattttggtcagactggcgactcagagtcagtccccgacccacaacctctcggagaacctccagcaacccccgctgctgtgggacctactacaatggcttcaggcggtggcgcaccaatggcagacaataacgaaggcgccgacggagtgggtaatgcctcaggaaattggcattgcgattccacatggctgggcgacagagtcatcaccaccagcacccgcacctgggccttgcccacctacaataaccacctctacaagcaaatctccagtgcttcaacgggggccagcaacgacaaccactacttcggctacagcaccccctgggggtattttgatttcaacagattccactgccacttttcaccacgtgactggcagcgactcatcaacaacaattggggattccggcccaagagactcaacttcaagctcttcaacatccaagtcaaggaggtcacgacgaacgatggcgtcacgaccatcgctaataaccttaccagcacggttcaagtcttctcggattcagagtaccaactgccgtacgtcctcggctctgcgcaccagggctgcctccctccgttcccggcggacgtgttcatgattccgcagtacggctacctaacgctcaacaatggcagccaggccgtgggacgttcatccttttactgcctggaatatttcccttctcagatgctgagaacgggcaacaactttaccttcagctacacctttgaggaagtgcctttccacagcagctacgcgcacagccagagcctggaccggctgatgaatcctctcatcgaccaatacctgtattacctgaacagaactcaaaatcagtccggaagtgcccaaaacaaggacttgctgtttagccgtgggtctccagctggcatgtctgttcagcccaaaaactggctacctggaccctgttatcggcagcagcgcgtttctaaaacaaaaacagacaacaacaacagcaattttacctggactggtgcttcaaaatataacctcaatgggcgtgaatccatcatcaaccctggcactgctatggcctcacacaaagacgacgaagacaagttctttcccatgagcggtgtcatgatttttggaaaagagagcgccggagcttcaaatactgcattggacaatgtcatgatcacagatgaagaggaaattaaagccactaaccctgtggccaccgaaagatttgggaccgtggcagtcaatttccagagcagcagcacagaccccgcgaccggagatgtgcatgttatgggagccttacctggcatggtgtggcaagacagagacgtatacctgcagggtcccatttgggccaaaattcctcacacggatggacactttcacccgtctcctctcatgggcggctttggacttaagcacccgcctcctcaaatcctcatcaaaaacacgcctgttcctgcgaatcctccggcagagttttcggctacaaagtttgcttcattcatcacccagtactccacaggacaagtgagtgtggaaattgaatgggagctgcagaaagaaaacagcaagcgctggaatcccgaagtgcagtacacatccaattatgcaaaatctgccaacgttgatttcactgtggacaacaatggactttatactgagcctcgccccattggcacccgttaccttacccgtcccttg

SEQ ID NO: 679 - DNA, 2196 bp, Artificial Sequence
  Synthetic polynucleotide
atggctgccgatggttatcttccagattggctcgaggacaacctctctgagggcattcgcgagtggtgggacttgaaacctggagccccgaaacctaaagccaaccagcaaaagcaggacgacggccggggtctggtgcttcctggctacaagtacctcggacccttcaacggactcgacaagggggagcccgtcaacgcggcggacgcagcggccctcgagcacgacaaggcctacgaccagcagctcaaagcgggtgacaatccgtacctgcggtataaccacgccgacgccgagtttcaggagcgtctgcaagaagatacgtcttttgggggcaacctcgggcgagcagtcttccaggccaagaagcgggttctcgaaccttttggtctggttgaggaaggcgctaagacggctcctggaaagaaacgtccggtagagcagtcgccacaagagccagactcctcctcgggcatcggcaagacaggccagcagcccgctaaaaagagactcaattttggtcagactggcgactcagagtcagtccccgacccacaacctctcggagaacctccagcaacccccgctgctgtgggacctactacaatggcttcaggcggtggcgcaccaatggcagacaataacgaaggcgccgacggagtgggtaatgcctcaggaaattggcattgcgattccacatggctgggcgacagagtcatcaccaccagcacccgcacctgggccttgcccacctacaataaccacctctacaagcaaatctccagtgcttcaacgggggccagcaacgacaaccactacttcggctacagcaccccctgggggtattttgatttcaacagattccactgccacttttcaccacgtgactggcagcgactcatcaacaacaattggggattccggcccaagagactcaacttcaagctcttcaacatccaagtcaaggaggtcacgacgaacgatggcgtcacgaccatcgctaataaccttaccagcacggttcaagccttctcggattcagagtaccaactgccgtacgtcctcggctctgcgcaccagggctgcctccctccgttcccggcggacgtgttcatgattccgcagtacggctacctaacgctcaacaatggcagccaggccgtgggacgttcatccttttactgcctggaatatttcccttctcagatgctgagaacgggcaacaactttaccttcagctacacctttgaggaagtgcctttccacagcagctacgcgcacagccagagcctggaccggctgatgaatcctctcatcgacccatacctgtattacctgaacagaactcaaaatcagtccggaagtgcccaaaacaaggacttgctgtttagccgtgggtctccagctggcatgtctgttcagcccaaaaactggctacctggaccctgttatcggcagcagcgcgtttctaaaacaaaaacagacaacaacaacagcaattttacctggactggtgcttcaaaatataacctcaatgggcgtgaatccatcatcaaccctggcactgctatggcctcacacaaagacgacgaagacaagttctttcccatgagcggtgtcatgatttttggaaaagagagcgccggagcttcaaatactgcattggacaatgtcatgatcacagatgaagaggaaattaaagccactaaccctgtggccaccgaaagatttgggaccgtggcagtcaatttccagagcagcagcacagaccccgcgaccggagatgtgcatgttatgggagccttacctggcatggtgtggcaagacagagacgtatacctgcagggtcccatttgggccaaaattcctcacacggatggacactttcacccgtctcctctcatgggcggctttggacttaagcacccgcctcctcaaatcctcatcaaaaacacgcctgttcctgcgaatcctccggcagagttttcggctacaaagtttgcttcattcatcacccagtactccacaggacaagtgagtgtggaaattgaatgggagctgcagaaagaaaacagcaagcgctggaatcccgaagtgcagtacacatccaattatgcaaaatctgccaacgttgatttcactgtggacaacaatggactttatactgagcctcgccccattggcacccgttacctt

SEQ ID NO: 680 - DNA, 2208 bp, Artificial Sequence
  Synthetic polynucleotide
atggctgccgatggttatcttccagattggctcgaggacaacctctctgagggcattcgcgagtggtgggacttgaaacctggagccccgaaacctaaagccaaccagcaaaagcaggacgacggccggggtctggtgcttcctggctacaagtacctcggacccttcaacggactcgacaagggggagcccgtcaacgcggcggacgcagcggccctcgagcacgacaaggcctacgaccagcagctcaaagcgggtgacaatccgtacctgcggtataaccacgccgacgccgagtttcaggagcgtctgcaagaagatacgtcttttgggggcaacctcgggcgagcagtcttccaggccaagaagcgggttctcgaaccttttggtctggttgaggaaggcgctaagacggctcctggaaagaaacgtccggtagagcagtcgccacaagagccagactcctcctcgggcatcggcaagacaggccagcagcccgctaaaaagagactcaattttggtcagactggcgactcagagtcagtccccgacccacaacctctcggagaacctccagcaacccccgctgctgtgggacctactacaatggcttcaggcggtggcgcaccaatggcagacaataacgaaggcgccgacggagtgggtaatgcctcaggaaattggcattgcgattccacatggctgggcgacagagtcatcaccaccagcacccgcacctgggccttgcccacctacaataaccacctctacaagcaaatctccagtgcttcaacgggggccagcaacgacaaccactacttcggctacagcaccccctgggggtattttgatttcaacagattccactgccacttttcaccacgtgactggcagcgactcatcaacaacaattggggattccggcccaagagactcaacttcaagctcttcaacatccaagtcaaggaggtcacgacgaacgatggcgtcacgaccatcgctaataaccttaccagcacggttcaagtcttctcggattcagagtaccaactgccgtacgtcctcggctctgcgcaccagggctgcctccctccgttcccggcggacgtgttcatgattccgcagtacggctacctaacgctcaacaatggcagccaggccgtgggacgttcatccttttactgcctggaatatttcccttctcagatgctgagaacgggcaacaactttaccttcagctacacctttgaggaagtgcctttccacagcagctacgcgcacagccagagcctggaccggctgatgaatcctctcatcgaccaatacctgtattacctgaacagaactcaaaatcagtccggaagtgcccaaaacaaggacttgctgtttagccgtgggtctccagctggcatgtctgttcagcccaaaaactggctacctggaccctgttatcggcagcagcgcgtttctaaaacaaaaacagacaacaacaacagcaattttacctggactggtgcttcaaaatataacctcaatgggcgtgaatccatcatcaaccctggcactgctatggcctcacacaaagacgacgaagacaagttctttcccatgagcggtgtcatgatttttggaaaagagagcgccggagcttcaaatactgcattggacaatgtcatgatcacagatgaagaggaaattaaagccactaaccctgtggccaccgaaagatttgggaccgtggcagtcaatttccagagcagcagcacagaccccgcgaccggagatgtgcatgttatgggagccttacctggcatggtgtggcaagacagagacgtatacctgcagggtcccatttgggccaaaattcctcacacggatggacactctcacccgtctcctctcatgggcggctttggacttaagcacccgcctcctcaaatcctcatcaaaaacacgcctgttcctgcgaatcctccggcagagttttcggctacaaagtttgcttcattcatcacccagtactccacaggacaagtgagtgtggaaattgaatgggagctgcagaaagaaaacagcaagcgctggaatcccgaagtgcagtacacatccaattatgcaaaatctgccaacgttgatttcactgtggacaacaatggactttatactgagcctcgccccattggcacccgttaccttacccgtcccttg

SEQ ID NO: 681 - DNA, 2208 bp, Artificial Sequence
  Synthetic polynucleotide
atggctgccgatggttatcttccagattggctcgaggacaacctctctgagggcattcgcgagtggtgggacttgaaacctggagccccgaaacctaaagccaaccagcaaaagcaggacgacggccggggtctggtgcttcctggctacaagtacctcggacccttcaacggactcgacaagggggagcccgtcaacgcggcggacgcagcggccctcgagcacgacaaggcctacgaccagcagctcaaagcgggtgacaatccgtacctgcggtataaccacgccgacgccgagtttcaggagcgtctgcaagaagatacgtcttttgggggcaacctcgggcgagcagtcttccaggccaagaagcgggttctcgaaccttttggtctggttgaggaaggcgctaagacggctcctggaaagaaacgtccggtagagcagtcgccacaagagccagactcctcctcgggcatcggcaagacaggccagcagcccgctaaaaagagactcaattttggtcagactggcgactcagagtcagtccccgacccacaacctctcggagaacctccagcaacccccgctgctgtgggacctactacaatggcttcaggcggtggcgcaccaatggcagacaataacgaaggcgccgacggagtgggtaatgcctcaggaaattggcattgcgattccacatggctgggcgacagagtcatcaccaccagcacccgcacctgggccttgcccacctacaataaccacctctacaagcaaatctccagtgcttcaacgggggccagcaacgacaaccactacttcggctacagcaccccctgggggtattttgatttcaacagattccactgccacttttcaccacgtgactggcagcgactcatcaacaacaattggggattccggcccaagagactcaacttcaagctcttcaacatccaagtcaaggaggtcacgacgaacgatggcgtcacgaccatcgctaataaccttaccagcacggttcaagtcttctcggattcagagtaccaactgccgtacgtcctcggctctgcgcaccagggctgcctccctccgttcccggcggacgtgttcatgattccgcagtacggctacctaacgctcaacaatggcagccaggccgtgggacgttcatccttttactgcctggaatatttcccttctcagatgctgagaacgggcaacaactttaccttcagctacacctttgaggaagtgcctttccacagcagctacgcgcacagccagagcctggaccggctgatgaatcctctcatcgacctatacctgtattacctgaacagaactcaaaatcagtccggaagtgcccaaaacaaggacttgctgtttagccgtgggtctccagctggcatgtctgttcagcccaaaaactggctacctggaccctgttatcggcagcagcgcgtttctaaaacaaaaacagacaacaacaacagcaattttacctggactggtgcttcaaaatataacctcaatgggcgtgaatccatcatcaaccctggcactgctatggcctcacacaaagacgacgaagacaagttctttcccatgagcggtgtcatgatttttggaaaagagagcgccggaacttcaaatactgcattggacaatgtcatgatcacagatgaagaggaaattaaagccactaaccctgtggccaccgaaagatttgggaccgtggcagtcaatttccagagcagcagcacagaccccgcgaccggagatgtgcatgttatgggagccttacctggcatggtgtggcaagacagagacgtatacctgcagggtcccatttgggccaaaattcctcacacggatggacactttcacccgtctcctctcatgggcggctttggacttaagcacccgcctcctcaaatcctcatcaaaaacacgcctgttcctgcgaatcctccggcagagttttcggctacaaagtttgcttcattcatcacccagtactccacaggacaagtgagtgtggaaattgaatgggagctgcagaaagaaaacagcaagcgctggaatcccgaagtgcagtacacatccaattatgcaaaatctgccaacgttgatttcactgtggacaacaatggactttatactgagcctcgccccattggcacccgttaccttacccgtcccttg

SEQ ID NO: 682 - DNA, 2208 bp, Artificial Sequence
  Synthetic polynucleotide
atggctgccgatggttatcttccagattggctcgaggacagcctctctgagggcattcgcgagtggtgggacttgaaacctggagccccgaaacctaaagccaaccagcaaaagcaggacgacggccggggtctggtgcttcctggctacaagtacctcggacccttcaacggactcgacaagggggagcccgtcaacgcggcggacgcagcggccctcgagcacgacaaggcctacgaccagcagctcaaagcgggtgacaatccgtacctgcggtataaccacgccgacgccgagtttcaggagcgtctgcaagaagatacgtcttttgggggcaacctcgggcgagcagtcttccaggccaagaagcgggttctcgaaccttttggtctggttgaggaaggcgctaagacggctcctggaaagaaacgtccggtagagcagtcgccacaagagccagactcctcctcgggcatcggcaagacaggccagcagcccgctaaaaagagactcaattttggtcagactggcgactcagagtcagtccccgacccacaacctctcggagaacctccagcaacccccgctgctgtgggacctactacgatggcttcaggcggtggcgcaccaatggcagacaataacgaaggcgccgacggagtgggtaatgcctcaggaaattggcattgcgattccacatggctgggcgacagagtcatcaccaccagcacccgcacctgggccttgcccacctacaataaccacctctacaagcaaatctccagtgcttcaacgggggccagcaacgacaaccactacttcggctacagcaccccctgggggtattttgatttcaacagattccactgccacttttcaccacgtgactggcagcgactcatcaacaacaattggggattccggcccaagagactcaacttcaagctcttcaacatccaagtcaaggaggtcacgacgaacgatggcgtcacgaccatcgctaataaccttaccagcacggttcaagtcttctcggattcagagtaccaactgccgtacgtcctcggctctgcgcaccagggctgcctccctccgttcccggcggacgtgttcatgattccgcagtacggctacctaacgcccaacaatggcagccaggccgtgggacgttcatccttttactgcctggaatatttcccttctcagatgctgagaacgggcaacaactttaccttcagctacacctttgaggaagtgcctttccacagcagctacgcgcacagccagagcctggaccggctgatgaatcctctcatcgaccaataccagtattacctgaacagaactcaaaatcagtccggaagtgcccaaaacaaggacttgctgtttagccgtgggtctccagctggcatgtctgttcagcccaaaaactggctacctggaccctgttatcggcagcagcgcgtttctaaaacaaaaacagacaacaacaacagcaattttacctggactggtgcttcaaaatataacctcaatgggcgtgaatccatcatcaaccctggcactgctatggcctcacacaaagacgacgaagacaagttctttcccatgagcggtgtcatgatttttggaaaagagagcgccggagcttcaaatactgcattggacaatgtcatgatcacagatgaagaggaaattaaagccactaaccctgtggccaccgaaagatttgggaccgtggcagtcaatttccagagcagcagcacagaccccgcgaccggagatgtgcatgttatgggagccttacctggcatggtgtggcaagacagagacgtatacctgcagggtcccatttgggccaaaattcctcacacggatggacactttcacccgtctcctctcatgggcggctttggacttaagcacccgcctcctcaaatcctcatcaaaaacacgcctgttcctgcgaatcctccggcagagttttcggctacaaagtttgcttcattcatcacccagtactccacaggacaagtgagtgtggaaattgaatgggagctgcagaaagaaaacagcaagcgctggaatcccgaagtgcagtacacatccaattatgcaaaatctgccaacgttgatttcactgtggacaacaatggactttatactgagcctcgccccattggcacccgttaccttacccgtcccttg

SEQ ID NO: 683 - DNA, 2208 bp, Artificial Sequence; identical to SEQ ID NO: 674
  Synthetic polynucleotide

SEQ ID NO: 684 - DNA, 2205 bp, Artificial Sequence
  Synthetic polynucleotide
atggctgccgatggttatcttccagattggctcgaggacactctctctgaaggaataagacagtggtggaagctcaaacctggcccaccaccaccaaagcccgcagagcggcataaggacgacagcaggggtcttgtgcttcctgggtacaagtacctcggacccttcaacggactcgacaagggagagccggtcaacgaggcagacgccgcggccctcgagcacgacaaagcctacgaccggcagctcgacagcggagacaacccgtacctcaagtacaaccacgccgacgcggagtttcaggagcgccttaaagaagatacgtcttttgggggcaacctcggacgagcagtcttccaggcgaaaaagagggttcttgaacctctgggcctggttgaggaacctgttaagacggctccgggaaaaaagaggccggtagagcactctcctgtggagccagactcctcctcgggaaccggaaaggcgggccagcagcctgcaagaaaaagattgaattttggtcagactggagacgcagactcagtacctgacccccagcctctcggacagccaccagcagccccctctggtctgggaactaatacgatggctacaggcagtggcgcaccaatggcagacaataacgagggcgccgacggagtgggtaattcctcgggaaattggcattgcgattccacatggatgggcgacagagtcatcaccaccagcacccgaacctgggccctgcccacctacaacaaccacctctacaaacaaatttccagccaatcaggagcctcgaacgacaatcactactttggctacagcaccccttgggggtattttgacttcaacagattccactgccacttttcaccacgtgactggcaaagactcatcaacaacaactggggattccgacccaagagactcaacttcaagctctttaacattcaagtcaaagaggtcacgcagaatgacggtacgacgacgattgccaataaccttaccagcacggttcaggtgtttactgactcggagtaccagctcccgtacgtcctcggctcggcgcatcaaggatgcctcccgccgttcccagcagacgtcttcatggtgccacagtatggatacctcaccctgaacaacgggagtcaggcagtaggacgctcttcattttactgcctggagtactttccttctcagatgctgcgtaccggaaacaactttaccttcagctacacttttgaggacgttcctttccacagcagctacgctcacagccagagtctggaccgtctcatgaatcctctcatcgaccagtacctgtattacttgagcagaacaaacactccaagtggaaccaccacgcagtcaaggcttcagttttctcgggccggagcgagtgacattcgggaccagtctaggaactggcttcctggaccctgttaccgccagcagcgagtatcaaagacatctgcggataacaacaacagtgaatactcgtggactggagctaccaagtaccacctcaatggcagagactctctggtgaatccgggcccggccatggcaagccacaaggacgatgaagaaaagttttttcctcagagcggggttctcatctttgggaagcaaggctcagagaaaacaaatgtggacattgaaaaggtcatgattacagacgaagaggaaatcaggacaaccaatcccgtggctacggagcagtatggttctgtatctaccaacctccagagaggcaacagacaagcagctaccgcagatgtcaacacacaaggcgttcttccaggcatggtctggcaggacagagatgtgtaccttcaggggcccatctgggcaaagattccacacacggacggacattttcacccctctcccctcatgggtggattcggacttaaacaccctcctccacagattctcatcaagaacaccccggtacctgcgaatccttcgaccaccttcagtgcggcaaagtttgcttccttcatcacacagtactccacgggacaggtcagcgtggagatcgagtgggagctgcagaaggaaaacagcaaacgctggaatcccgaaattcagtacacttccaactacaacaagtctgttaatgtggactttactgtggacactaatggcgtgtattcagagcctcgccccattggcaccagatacctgactcgtaatctg

SEQ ID NO: 685 - protein, 736 aa, Artificial Sequence
  Synthetic polypeptide
MAADGYLPDWLEDNLSEGIREWWALKPGAPQPKANQQHQDNARGLVLPDYKYLGPGNGLDKGEPVNAADVAALEHDKAYDQQLKAGDNPYLKYNHADAEFQERLKEDTSFGGNLGRAVFQAKKRLLEPLGLVEEAAKTAPGKKRPVEQSPQEPDSSAGIGKSGAQPAKKRLNFGQTGDTESVPDPQPIGEPPAAPSGVGSLTMASGGGAPVADNNEGADGVGSSSGNWHCDSQWLGDGVITTSTRTWALPTYNNHLYKQISNSTSGGSSNDNAYFGYSTPWGYFDFNRFHCHFSPRDWQRLINNNWGFRPKRLNFKLFNIQVKEVTDNNGVKTIANNLTSTVQVFTDSDYQLPYVLGSAHEGCLPPFPADVFMIPQYGYLTLNDGSQAVGRSSFYCLEYFPSQMLRTGNNFQFSYEFENVPFHSSYAHSQSLDRLMNPLIDQYLHYLPKTINGSGQNQQTLKFSVAGPSNMAVQGRNYIPGPSYRQQRVSTTVTQNNNSEFAWPGASSWALNGRNSLMNPGPAMASYKEGEDSFFPLSGSLIFGKQGTGRDNVDADKVMITNEEEIKTTNPVATESYGQVATNHQSAQAQAQTGWVQNQGILPGMVWQDRDVYLQGPIWAKIPHTDGNFHPSPLMGGFGMKHPPPQTLIKNTPVPADPPTAFNKDKLNSFITQYSTGQVSVEIEWELQKENSKRWNPEIQYTSNYYKSNNVEFAVNTEGVYSEPRPIGTRYLTRNL

SEQ ID NO: 686 - protein, 736 aa, Artificial Sequence
  Synthetic polypeptide
MAADGYLPDWLEDNLSEGIREWWALKPGAPQPKANQQHQDNARGLVLPGYKYLGPGNGLDKGEPVNAADAAALEHDKAYDQQLKAGDNPYLKYNHADAEFQERLKEDTSFGGNLGRAVFQAKRRLLEPLGLVEEAAKTAPGKKRPVEQSPQEPDSSAGIGKSGAQPAKKRLNFGQTGDTESVPDPQPIGEPPAAPSGVGSLTMASGGGAPVADNNEGADGVGSSSGNWHCDSQWLGDRVITTSTRTWALPTYNNHLYKQISNSTSGGSSNDNAYFGYSTPWGYFDFNRFHCHFSPRDWQRLINNNWGFRPKRLNFKLFNIQIKEVTDNNGVKTIANNLTSTVQVFTDLDYQLPYVLGSAHEGCLPPFPADVFMIPQYGYLTLNDGSQAVGRSSFYCLEYFPSQMLRTGNNFQFSYEFENVPFHSSYAHSQSLDRLMNPLIDQYLHYLSKTINGSGQNQQTLKFSVAGPSNMAVQGRNYIPGPSYRQQRVSTTVTQNNNSEFAWPGASSWALNGRNSLMNPGPAMASYKEGEDSFFPLSGSLIFGKQGTGRDNVDADKVMITNEEEIKTTNPVATESYGQVATNHQSAQAQAQTGWVQNQGILPGMVWQDRDVYLQGPIWAKIPHTDGNFHPSPLMGGFGMKHPPPQTLIKNTPVPADPPTAFNKDKLNSFITQYSTGQVSVEIEWELQKENSKRWNPEIQYTSNYYKSNNVEFAVNTEGVYSEPRPIGTRYLTRNL

SEQ ID NO: 687 - protein, 736 aa, Artificial Sequence
  Synthetic polypeptide
MAADGYLPDWLEDNLSEGIREWWALKPGAPQPKANQQHQDNARGLVLPGYKYLGPGNGLDKGEPVSAADAAALEHDKAYDQQLKAGDNPYLKYNHADAEFQERLKEDTSFGGNLGRAVFQAKKRLLEPLGLVEEAAKTAPGKKRPVEQSPQEPDSSAGIGKSGAQPAKKRLNFGQTGDTESVSDPQPIGEPPAAPSGVGSLTMASGGGAPVADNNEGADGVGSSSGNWHCDSQWLGDRVITTSTRTWALPTYNNHLYKQISNSTSGGSSNDNAYFGYSTPWGYFDFNRFHCHFSPRDWQRLINNNWGFRPKRLNFKLFNIQVKEVTDNNGVKTIANNLTSTVQVFTDSDYQLPYVLGSAHEGCLPPSPADVFMIPQYGYLTLNDGSQAVGRSSFYCLEYFPSQMLRTGNNFQFSYEFENVPFHSSYAHSQSLDRLMNPLIDQYLHYLSKTINGSGQNQQTLKFSVAGPSNMAVQGRNYIPGPSYRQQRVSTTVTQNNNSEFAWPGASSWALNGRNSLMNPGPAMASYKEGEDSFFPLSGSLIFGKQGTGRDDVDADKVIITNEEEIKTTNPVATESYGQVATNHQSAQAQAQTGWVQNQGILPGMVWQDRDVYLQGPIWAKIPHTDGNFHPSPLMGGFGMKHPPPQTLIKNTPVPADPPTAFNKDKLNSFITQYSTGQVSVEIEWELQKENSKRWNPEIQYTSNYYKSNNVEFAVNTEGVYSEPRPIGTRYLTRNL

SEQ ID NO: 688 - protein, 736 aa, Artificial Sequence
  Synthetic polypeptide
MAADGYLPDWLEDNLSEGIREWWALKPGAPQPKANQQHQDNARGLVLPGYKYLGPGNGLDKGEPVNAADAAALEHDKAYDQQLKAGDNPYLKYNHAGAEFQERLKEDTSFGGNLGRAVFQAKKRLLEPLGLVEEAAKTAPGKKRPVEQSPQEPDSSAGIGKSGAQPAKKRLNFGQTGDTESVPDPQPIGEPPAAPSGVGSLTMASGGGAPVADNNEGAGGVGSSSGNWHCDSQWLGDRVVTTSTRTWALPTYNNHLYKQISNSTSGGSSNDNAYFGYSTPWGYFDFNRFHCHFSPRDWQRLINNNWGFRPKRLNFKLFNIQVKEVTDNNGVKTIANNLTSTVQVFTDSDYQLPYVLGSAHGGCLPPFPADVFMIPQYGYLTLNDGSQAVGRSSFYCLEYFPSQMLRTGNNFQFSYEFENVPFHSSYAHSQSLDRLMNPLIDQYLHYLSKTINGSGQNQQTLKFSVAGPSNMAVQGRSYIPGPSYRQQRVSTTVTQNNNSEFAWPGASSWALNGRNSLMNPGPAMASYKEGEDSFFPLSGSLIFGKQGTGRDNVDADKVMITNEEEIKTTNPVATESYGQVATNHQSAQAQAQTGWVQNQGILPGMVWQDRDVYLQGPIWAKIPHTDGNFHPSPLMGGFGMKHPPPQTLIKNTPVPADPPTAFNKDKLNSFITQYSTGQVSVEIEWELQKENSKRWNPEIQYTSNYYKSNNVEFAVNTEGVYSEPRPIGTRYLTRNL

SEQ ID NO: 689 - protein, 736 aa, Artificial Sequence
  Synthetic polypeptide
MAADGYLPDWLEDNLSEGIREWWALKPGAPQPKANQQHQDNARGLVLPGYKYLGPGNGLDKGEPVNAADAAALEHDKAYDQQLKAGDNPYLKYNHADAEFQERLKEDTSFGGNLGRAVFQAKKRLLEPLGLVEEAAKTAPGKKRPVEQSPQEPDSSAGIGKSGAQPAKKRLNFGQTGDTESVPDPQPIGEPPAAPSGVGSLTMASGGGAPVADNNEGADGVGSSSGNWHCDSQWLGDRVVTTSTRTWALPTYNNHLYKQISNSTSGGSSNDNAYFGYSTPWGYFDFNRFHCHFSPRDWQRLINNNWGFRPKRLNFKLFNIQVKEVTDNNGVKTIANNLTSTVQVFTDSDYQLPYVLGSAHEGCLPPFPADVFMIPQYGYLTLNDGSQAVGRSSFYCLEYFPSQMLRTGNNFQFSYEFENVPFHSSHAHSQSLDRLMNPLIDQYLHYLSKTINGSGQNQQTLKFSVAGHSNMAVQGRNYIPGPSYRQQRVSTTVTQNNNSEFAWPGASSWALNGRNSLMNPGPAMASYKEGEDSFFPLSGSLIFGKQGTGRDNVDADKVMITNEEEIKTTNPVATESYGQVATNHQSAQAQAQTGWVQNQGILPGMVWQDRDVYLQGPIWAKIPHTDGNFHPSPLMGGFGMKHPPPQTLIKNTPVPADPPTAFNKDKLNSFITQYSTGQVSVEIGWELQKENSKRWNPEIQYTSNYYKSNNVEFAVNTEGVYSEPRPIGTRYLTRNL

SEQ ID NO: 690 - protein, 736 aa, Artificial Sequence
  Synthetic polypeptide
MAADGYLPDWLEDNLSEGIREWWALKPGAPQPKANQQHQDNARGLVLPGYKYLGPGNGLDKGEPVNAADAAALEHDKAYDQQLKAGDNPYLKYNHADAEFQERLKEDTSFGGNLGRAVFQAKKRLLEPLGLVEEAAKTAPGKKRPVEQSPQEPDSSAGIGKSGAQPAKKRLNFGQTGDTESVPDPQPIGEPPAAPSGVGSLTMASGGGAPVADNNEGADGVGSSSGNWHCDSQWLGDRVITTSTRTWALPTYNNRLYKQISNSTSGGSSNDNAYFGYSTPWGYFDFNRFHCHFSPRDWQRLINNNWGFRPKRLNFKPFNIQVKEVTDNNGVKTIANNLTSTVQVFTDSDYQLPYVLGSAHEGCLPPFPADVFMIPQYGYLTLNDGSQAVGRSSFYCLEYFPSQMLRTGNNFQFSYEFENVPFHSSYAHSQSLDRLMNPLIDQYLHYLSKTINGSGQNQQTLKFSVAGPSNMAVQGRNYIPGPSYRQQRVSTTVTQNNNSEFAWPGASSWALNGRNSLMNPGPAMASYKEGEDSFFPLSGSLIFGKQGTGRDNVDADKVMITNEEEIKTTNPVATESYGQVATNHQSAQAQAQTGWVQNQGILPGMVWQDRDVYLQGPIWAKIPHTDGNFHPSPLMGGFGMKHPPPQTLIKNTPVPADPPTAFNKDKLNSFITQYSTGQVSVEIEWELQKENSKRWNPEIQYTSNYYKSNNVEFAVNTEGVYSEPRPIGTRYLTRNL

SEQ ID NO: 691 - protein, 736 aa, Artificial Sequence
  Synthetic polypeptide
MAADGYLPDWLEDNLSEGIREWWALKPGAPQPKANQQHQDNARGLVLPGYKYLGPGNGLDKGEPVNAADAAALEHDKAYDQQLKAGDNPYLKYNHADAEFQERLKEDTSFGGNLGRAVFQAKKRLLEPLGLVEEAAKTAPGKKRPVEQSPQEPDSSAGIGKSGAQPAKKRLNFGQTGDTESVPDPQPIGEPPAAPSGVGSLTMASGGGAPVADNNEGADGVGSSSGNWHCDSQWLGDRVITTSTRTWALPTYNNHLYKQISNSTSGGSSNDNAYFGYSTPWGYFDFNRFHCHFSPRDWQRLINNNWGFRPKRLNFKLFNIQVKEVTDNNGVKTIANNLTSTVQVFTDSDYQLPYVLGSAHEGCLPPFPADVFMIPQYGYLTLNDGSQAVGRSSFYCLEYFPSQMLRTGNNFQFSYEFENVPFHSSYAHSQSLDRLMNPLIDQYLHYLSKTINGSGQNQQTLKFSVAGPSNMAVQGRNYIPGPSYRQQRVSTTVTQNNNSEFAWPGASSWALNGRNSLMNPGPAMASYKEGEDSFFPLSGSLIFGKQGTGRDNVDADKVMITNEEEIKTTNPVATESYGQVATNHQSAQAQAQTGWVQNQGILPGMVWQDRDVYLQGPIWAKIPHTDGNFHPSPLMGGFGMKHPPPQTLIKNTPVPADPPTAFNKDKLNSFITQYSTGQVSVEIEWELQKENSKRWNPEIQYTSNYYKSNNVEFAVNTEGVYSEPRPIGTRYLTRNL

SEQ ID NO: 692 - protein, 736 aa, Artificial Sequence; identical to SEQ ID NO: 691
  Synthetic polypeptide

SEQ ID NO: 693 - protein, 736 aa, Artificial Sequence
  Synthetic polypeptide
MAADGYLPDWLEDNLSEGIREWWDLKPGAPKPKANQQKQDDGRGLVLPGYKYLGPFNGLDKGEPVNAADAAALEHDKAYDQQLKAGDNPYLRYNHADAEFQERLQEDTSFGGNLGRAVFQAKKRVLEPFGLVEEGAKTAPGKKRPVEQSPQEPDSSSGIGKSGQQPAKKRLNFGQTGDSESVPDPQPLGEPPATPAALGPTTMASGGGAPMADNNEGADGVGNASGNWHCDSTWLGDRVITTSTRTWALPTYNNHLYKQISSASTGASNDNHYFGYSTPWGYFDFNRFHCHFSPRDWQRLINNNWGFRPKRLNFKLFNIQVKEVTTNDGVTTIANNLTSTVQVFSDSEYQLPYVLGSAHQGCLPPFPADVFMIPQYGYLTLNNGSKAVGRSSFYCLEYFPSQMLRTGNNFTFSYTFEEVPFHSSYAHSQSLDRLMNPLIDQYLYYLNRTQNQSGSAQNKDLLFSRGSPAGMSVQPKNWLPGPCYRQQRVSKTKTDNNNSNFTWTGASKYNLNGRESIINPGTAMASHKDDEDKFFPMSGVMIFGKESAGASNTALDNVMITDEEEIKATNPVATERFGTVAVNFQSSSTDPATGDVHVMGALPGMVWQDRDVYLQGPIWAKIPHTDGHFHPSPLMGGFGLKHPPPQILIKNTPVPANPPAEFSATKFASFITQYSTGQVSVEIEWELQKENSKRWNPEVQYTSNYAKSANVDFTVDNNGLYTEPRPIGTRYLTRPL

SEQ ID NO: 694 - protein, 736 aa, Artificial Sequence
  Synthetic polypeptide
MAADGYLPDWLEDNLSEGIREWWDLKPGAPKPKANQQKQDDGRGLVLPGYKYLGPFNGLDKGEPVNAADAAALEHDKAYDQQLKAGDNPYLRYNHADAEFQERLQEDTSFGGNLGRAVFQAKKRVLEPLGLVEEGAKTAPGKKRPVEQSPQEPDSSSGIGKTGQQPAKKRLNFGQTGDSESVPDPQPLGEPPATPAAVGPTTMASGGGAPMADNNEGADGVGNASGNWHCDSTWLGDRVITTSTRTWALPTYNNHLYKQISSTSTGASNDNHYFGYSTPWGYFDFNRFHCHFSPRDWQRLINNNWGFRPKRLNFKLFNIQVKEVTTNDGVTTIANNLTSTVQVFSDSEYQLPYVLGSAHQGCLPPFPADVFMIPQYGYLTLNNGSQAVGRSSFYCLEYFPSQMLRTGNNFTFSYTFEEVPFHSSYAHSQSLDRLMNPLIDQYLYYLNRTQNQSGSAQNKDLLFSRGSPAGMSVQPKNWLPGPCYRQQRVSKTKTDNNNSNFTWTGASKYNLNGRESIINPGTAVASHKDDEDKFFPMSGVMIFGKESAGASNTALDNVMITDEEEIKATNPVATERFGTVAVNFQSSSTDPATGDVHAMGALPGMVWQDRDVYLQGPIWAKIPHTDGHFHPSPLMGGFGLKNPPPQILIKNTPVPANPPAEFSATKFASFITQYSTGQVSVEIEWELQKENSKRWNPEVQYTSNYAKSANVDFTVDNNGLYTEPRPIGTRYLTRPL

SEQ ID NO: 695 - protein, 736 aa, Artificial Sequence
  Synthetic polypeptide
MAADGYLPDWLEDNLSEGIREWWALKPGAPQPKANQQHQDNARGLVLPGYKYLGPGNGLDKGEPVNAADAAALEHDKAYDQQLKAGDNPYLKYNHADAEFQERLKEDTSFGGNLGRAVFQAKKRLLEPLGLVEEAAKTAPGKKRPVEQSPQEPDSSAGIGKSGAQPAKKRLNFGQTGDTESVPDPQPIGEPPAAPSGVGSLTMASGGGAPVADNNEGADGVGSSSGNWHCDSQWLGDRVITTSTRTWALPTYNNHLYKQISNSTSGGSSNDNAYFGYSTPWGYFDFNRFHCHFSPRDWQRLINNNWGFRPKRLNFKLFNIQVKEVTDNNGVKTIANNLTSTVQVFTDSDYQLPYVLGSAHEGCLPPFPADVFMIPQYGYLTLNDGSQAVGRSSFYCLEYFPSQMLRTGNNFQFGYEFENVPFHSSYAHSQSLDRLMNPLIDQYLYYLSKTINGSGQNQQTLKFSVAGPSNMAVQGRNYIPGPSYRQQRVSTTVTQNNNSEFAWPGASSWALNGRNSLMNPGPAMASHKEGEDRFFPLSGSLIFGKQGTGRDNVDADKVMITNEEEIKTTNPVATESYGQVATNHQSAQAQAQTGWVQNQGILPGMVWQDRDVYLQGPIWAKIPHTDGNFHPSPLMGGFGMKHPPPQILIKNTPVPADPPTAFNKDKLNSFITQYSTGQVSVEIEWELQKENSKRWDPEIQYTSNYYKSNNVEFAVNTEGVYSEPRPIGTRYLTRNL

SEQ ID NO: 696 - protein, 736 aa, Artificial Sequence
  Synthetic polypeptide
MAADGYLPDWLEDNLSEGIREWWALKPGAPQPKANQQHQDNARGLVLPGYKYLGPGNGLDKGEPVNAADAAALEHDKAYDQQLKAGDNPYLKYNHADAEFQERLKEDTSFGGNLGRAVFQAKKRLLEPLGLVEEAAKTAPGKKRPVEQSPQEPDSSAGIGKSGAQPAKKRLNFGQTGDTESVPDPQPIGEPPAAPSGVGSLTMASGGGAPVADNNEGADGVGSSSGNWHCDSQWLGDRVITTSTRTWALPTYNNHLYKQISNSTSGGSSNDNAYFGYSTPWGYFDFNRFHCRFSPRDWQRLINNNWGFRPKRLNFKLFNIQVKEVTDNNGVKTIANNLTSTVQVFTDSDYQLPYVLGSAHEGCLPPFPADVFMIPQYGYLTLNDGSQAVGRSSFYCLEYFPSQMLRTGNNFQFSYEFENVPFHSSYAHSQSLDRLMNPLIDQYLYYLSKTINGSGQNQQTLKFSVAGPSNMAVQGRNYIPGPSYRQQRVSTTVTQNNNSEFAWPGASSWALNGRNSLMNPGPAMASHKEGEDRFFPLSGSLIFGKQGTGRDNVDADKVMITNEEEIKTTNPVATESYGQVATNHQSAQAQAQTGWVQNQGILPGMVWQDRDVYLQGPIWAKIPHTDGNFHPSPLMGGFGMKHPPPQILIKNAPVPADPPTAFNKDKLNSFITQYSTGQVSVEIEWELQKENSKRWNPEIQYTSNYYKSNNVEFAVNTEGVYSEPRPIGTRYLTRNL

SEQ ID NO: 697 - protein, 736 aa, Artificial Sequence
  Synthetic polypeptide
MAADGYLPDWLEDNLSEGIREWWALKPGAPQPKANQQHQDNARGLVLPGYKYLGPGNGLDKGEPVSAADAAALEHDKAYDQQLKAGDNPYLKYNHADAEFQERLKEDTSFGGNLGRAVFQAKKRLLEPLGLVEEAAKTAPGKKRPVEQSPQEPDSSAGIGKSGAQPAKKRLNFGQTGDTESVPDPQPIGEPPAAPSGVGSLTMASGGGAPVADNNEGADGVGSSSGNWHCDSQWLGDRVITTSTRTWALPTYNNHLYKQISNSTSGGSSNDNAYFGYSTPWGYFDFNRFHCHFSPRDWQRLINNNWGFRPKRLNFKLFNIQVKEVTDNNGVKTIANNLTSTVQVFTDSDYQLPYVLGSAHEGCLPPFPADVFMIPQYGYLTLNDGSQAVGRSSFYCLEYFPSQMLRTGNNFQFSYEFENVPFHSSYAHSQSLDRLMNPLIDQYLYYLSKTINGSGQNQQTLKFSVAGPSNMAVQGRNYIPGPSYRQQRVSTTVTQNNNSEFAWPGASSWALNGRNSLMNPGPAMASHKEGEDRFFPLSGSLIFGKQGTGRDNVDADKVMITNEEEIKTTNPVATESYGQVATNHQSAQAQAQTGWVQNQGILPGMVWQDRDVYLQGPIWAKIPHTDGNFHPSPLMGGFGMKHPPPQILIKNTPVPADPPTAFNKDKLNSFITQYSTGQVSVEIEWELQKENSKRWNPEIQYTSNYYKSNNVEFAVNTEGVYSEPRPIGTRYLTRNL

SEQ ID NO: 698 - protein, 736 aa, Artificial Sequence
  Synthetic polypeptide
MAADGYLPDWLEDNLSEGIREWWALKPGAPQPKANQQHQDNARGLVLPGYKYLGPGNGLDKGEPVNAADAAALEHDKAYDQQLKAGDNPYLKYNHADAEFQERLKEDTSFGGNLGRAVFQAKKRLLEPLGLVEEAAKTAPGKKRPVEQSPQEPDSSAGIGKSGAQPAKKRLNFGQTGDTESVPDPQPIGEPPAAPSGVGSLTMASGGGAPVADNNEGADGVGSSSGNWHCDSQWLGDRVITTSTRTWALPTYNNHLYKQISNSTSGGSSNDNAYFGYSTPWGYFDFNRFHCHFSPRDWQRLINNNWGFRPKRLNFKLFNIQVKEVTDNNGVKTIANNLTSTVQVFTDSDYQLPYVLGSAHEGCLPPFPADVFMIPQYGYLTLNDGSQAVGRSSFYCLEYFPSQMLRTGNNFQFSYEFENVPFHSSYAHSQSLDRLMNPLIDQYLYYLSKTINGSGQNQQTLKFSVAGPSNTAVQGRNYIPGPSYRQQRVSTTVTQNNNSEFAWPGASSWALNGRNSLMNPGPAMASHKEGEDRFFPLSGSLIFGKQGTGRDNVDADKVMITNEEEIKTTNPVATESYGQVATNHQSAQAQAQTGWVQNQGILPGMVWQDRDVYLQGPIWAKIPHTDGNFHPSPLMGGFGMKHPPPQILIKNTPVPADPPTAFNKDKLNSFITQYSTGQVSVEIEWELQKENSKRWNPEIQYTSNYYKSNNVEFAVNTEGVYSEPRPIGTRYLTRNL

SEQ ID NO: 699 - protein, 736 aa, Artificial Sequence
  Synthetic polypeptide
MAADGYLPDWLEDNLSEGIREWWALKPGAPQPKANQQHQDNARGLVLPGYKYLGPGNGLDKGEPVNAADAAALEHDKAYDQQLKAGDNPYLKYNHADAEFQERLKEDTSFGGNLGRAVFQAKKRLLEPLGLVEEAAKTAPGKKRPVEQSPQEPDSSAGIGKSGAQPAKKRLNFGQTGDTESVPDPQPIGEPPAAPSGVGSLTMASGGGAPVADNNEGADGVGSSSGNWHCDSQWLGDRVITTSTRTWALPTYNNHLYKQISNSTSGGSSNDNAYFGYSTPWGYFDFNRFHCHFSPRDWQRLINNNWGFRPKRLNFKLFNIQVKEVTDNNGVKTIANNLTSTVQVFTDSDYQLPYVLGSAHEGCLPPFPADVFMIPQYGYLTLNDGSQAVGRSSFYCLEYFPSQMLRTGSNFQFSYEFENVPFHSSYAHSQSLDRLMNPLIDQYLYYLSKTINGSGQNQQTLKFSVAGPSNMAVQGRNYIPGPSYRQQRVSTTVTQNNNSEFAWPGASSWALNGRNSLMNPGPAMASHKEGEDRFFPLSGSLIFGKQGTGRDNVDADKVMITNEEEIKTTNPAATESYGQVATNHQSAQAQAQTGWVQNQGILPGMVWQDRDVYLQGPIWAKIPHTDGNFHPSPLMGGFGMKHPPPQILIKNTPVPADPPTAFNKDKLNSFITQYSTGQVSVEIEWELQKENSKRWNPEIQHTSNYYKSNNVEFAVNTEGVYSEPRPIGTRYLTRNL

SEQ ID NO: 700 - protein, 736 aa, Artificial Sequence
  Synthetic polypeptide
MAADGYLPDWLEDNLSEGIREWWALKPGAPQPKANQQHQDNARGLVLPGYKYLGPGNGLDKGEPVNAADAAALEHDKAYDQQLKAGDNPYLKYNHADAEFQERLKEDTSFGGNLGRAVFQAKKRLLEPLGLVEEAAKTAPGKKRPVEQSPQEPDSSAGIGKSGAQPAKKRLNFGQTGDTESVPDPQPIGEPPAAPSGVGSLTMASGGGAPVADNNEGADGVGSSSGNWHCDSQWLGDRVITTSTRTWALPTYNNHLYKQISNSTSGGSSNDNAYFGYSTPWGYFDFNRFHCHFSPRDWQRLINNNWGFRPKRLNFRLFNIQVKEVTDNNGVKTIANNLTSTVQVFTDSDYQLPYVLGSAHEGCLPPFPADVFMIPQYGYLTLNDGSQAVGRSSFYCLEYFPSQMLRTGNNFQFSYEFENVPFHSSYAHSQSLDRLMNPLIDQYLYYLSKTINGSGQNQQTLKFSVAGPSNMAVQGRNYIPGPSYRQQRVSTTVTQNNNSEFAWPGASSWALNGRNSLMNPGPAMASHKEGEDRFFPLSGSLIFGKQGTGRDNVDADKVMITNEEEIKTTNPVATESYGQVATNHQSAQAQAQTGWVQSQGILPGMVWQDRDVYLQGPIWAKIPHTDGNFHPSPLMGGFGMKHPPPQILIKNTPVPADPPTAFNKDKLNSFITQYSTGQVSVEIEWELQKENSKRWNPEIQYTSNYYKSNNVEFAVNTEGVYSEPRPIGTRYLTRNL

SEQ ID NO: 701 - protein, 735 aa, Artificial Sequence
  Synthetic polypeptide
MAADGYLPDWLEDNLSEGIREWWALKPGAPQPKANQQHQDNARGLVLPGYKYLGPGNGLDKGEPVNAADAAALEHDKAYDQQLKAGDNPYLKYNHADAEFQERLKEDTSFGGNLGRAVFQAKKRLLEPLGLVEEAAKTAPGKKRPVEQSPQEPDSSAGIGKSGAQPAKKRLNFGQTGDTESVPDPQPIGEPPAAPSGVGSLTMASGGGAPVADNNEGADGVGSSSGNWHCDSQWLGDRVITTSTRTWALPTYNNHLYKQISNSTSGGSSNDNAYFGYSTPWRYFDFNRFHCHFSPRDWQRLINNWGFRPKRLNFKLFNIQVKEVTDNNGVKTIANNLTSTVQAFTDSDYQLPYVLGSAHEGCLPPFPADVFMIPQYGYLTLNDGSQAVGRSSFYCLEYFPSQMLRTGNNFQFSYEFENVPFHSSYAHSQSLDRLMNPLIDQYLYYLSKTINGSGQNQQTLKFSVAGPSNMAVQGRNYIPGPSYRQQRVSTTVTQNNNSEFAWPGASSWALNGRNSLMNPGPAMASHKEGEDRFFPLSGSLIFGKQGTGRDNVDADKVMITNEEEIKTTNPVATESYGQVATNHQSAQAQAQTGWVQNQGILPGMVWQDRDVYLQGPIWAKIPHTDGNFHPSPLMGGFGMKHPPPQILIKNTPVPADPPTAFNKDELNSFITQYSTGQVSVEIEWELQKENSKRWNPEIQYTSNYYKSNNVEFAVNTEGVYSEPRPIGTRYLTRNL

SEQ ID NO: 702 - protein, 735 aa, Artificial Sequence
  Synthetic polypeptide
MAADGYLPDWLEDNLSEGIREWWALKPGAPQPKANQQHQDNARGLVLPGYKYLGPGNGLDKGEPVNAADAAALEHDKAYDQQLKAGDNPYLKYNHADAEFQERLKEDTSFGGNLGRAVFQDKKRLLEPLGLVEEAAKTAPGKKRPVEQSPQEPDSSAGIGKSGAQPAKKRLNFGQTGDTESVPDPQPIGEPPAAPSGVGSLTMASGGGAPVADNNEGADGVGSSSGNWHCDSQWLGDRVITTSTRTWALPTYNNHLYKQISNSTSGGSSNDNAYFGYSTPWGYFDFNRFHCHFSPRDWQRLINNWGFRPKRLNFKLFNIQVKEVTDNNGVKTIANNLTSTVQVFTDSDYQLPYVLGSAHEGCLPPFPADVFMIPQYGYLTLNDGSQAVGRSSFYCLEYFPSQMLRTGNNFQFSYEFENVPFHSSYAHSQSLDRLMNPLIDQYLYYLSKTINGSGQNQQTLKFSVAGPSNMAVQGRNYIPGPSYRQQRVSTTVTQNNNSEFAWPGASSWALNGRNSLMNPGPAMASHKEGEDRFFPLSGSLIFGKQGTGRDNVDADKVMITNEEEIKTTNPVATESYGQVATNHQSAQAQAQTGWVQNQGILPGMVWQDRDVYLQGPIWAKIPHTDGNFHPSPLMGGFGMKHPPPQILIKNTPVPADPPTAFNKDKLNSFITQYSTGQVSVEIEWELQKENSKRWNPEIQYTSNYYKSNNVEFAVNTEGVYSEPRPIGTRYLTRNL

SEQ ID NO: 703 - protein, 736 aa, Artificial Sequence
  Synthetic polypeptide
MAADGYLPDWLEDNLSEGIREWWALKPGAPQPKANQQHQDNARGLVLPGYKYLGPGNGLDKGEPVNAADAAALEHDKAYDQQLKAGDNPYLKYNHADAEFQERLKEDTSFGGNLGRAVFQAKKRLLEPLGLVEEAAKTAPGKKRPVEQSPQEPDSSAGIGKSGAQPAKKRLNFGQTGDTESVPDPQPIGEPPAAPSGVGSLTMASGGGAPVADNNEGADGVGSSSGNWHCDSQWLGDRAITTSTRTWALPTYNNHLYKQISNSTSGGSSNDNAYFGYSTPWGYFDFNRFHCHFSPRDWQRLINNNWGFRPKRLNFKLFNIQVKEVTDNNGVKTIANNLTSTVQVFTDSDYQLPYVLGSAHEGCLPPFPADVFMIPQYGYLTLNDGSQAVGRSSFYCLEYFPSQMLRTGNNFQFSYEFENVPFHSSYAHSQSLDRLMNPLIDQYLYYLSKTINGSGQNQQTLKFSVAGPSNMAVQGRNYIPGPSYRQQRVSTTVTQNNNSEFAWPGASSWALNGRNSLMNPGPAMASHKEGEDRFFPLSGSLIFGKQGTGRDNVDADKVMTTNEEEIKTTNPVATESYGQVATNHQSAQAQAQTGWVQNQGILPGMVWQDRDVYLQGPIWAKIPHTDGNFHPSPLMGGFGMKHPPPQILIKNTPVPADPPTAFNKDKLNSFITQYSTGQVSVEIEWELQKENSKRWNPEIQYTSNYYKSNNVEFAVNTEGVYSEPRPIGTRYLTRNL

SEQ ID NO: 704 - protein, 736 aa, Artificial Sequence
  Synthetic polypeptide
MAADGYLPDWLEDNLSEGIREWWALKPGAPQPKANQQHQDNARGLVLPGYKYLGPGNGLDKGEPVNAADAAALEHDKAYDQQLKAGDNPYLKYNHADAEFQERLKEDTSFGGNLGRAVFQTKKRLLEPLGLVEEAAKTAPGKKRPVEQSPQEPGSSAGIGKSGAQPAKKRLNFGQTGDTESVPDPQPIGEPPAAPSGVGSLTMASGGGAPVADNNEGADGVGSSSGNWHCDSQWLGDRVITTSTRTWALPTYNNHLYKQISNSTSGGSSNDNAYFGYSTPWGYFDFNRFHCHFSPRDWQRLINNNWGFRPKRLNFKLFNIQVKEVTDNNGVKTIANNLTSTVQVFTDSDYQLPYVLGSAHEGCLPPFPADVFMIPQYGYLTLNDGSQAVGRSSFYCLEYFPSQMLRTGNNFQFSYEFENVPFHSSYAHSQSLDRLMNPLIDQYLHYLSKTINGSGQNQQTLKFSVAGPSNMAVQGRNYIPGPSYRQQRVSTTVTQNNNSEFAWPGASSWALNGRNSLMNPGPAMASHKEGEDRFFPLSGSLIFGKQGTGRDNVDADKVMITNEEEIKTTNPVATESYGQVATNHQSAQAQAQTGWVQNQGILPGMVWQDRDVYLQGPIWAKIPHTDGNFHPSPLMGGFGMKHPPPQILIKNTPVPADPPTAFNKDKLNSFITQYSTGQVSVEIEWELQKENSKRWNPEIQYTSNYYKSNNVEFAVNTEGVYSEPRPIGTRYLTRNL

SEQ ID NO: 705 - protein, 736 aa, Artificial Sequence
  Synthetic polypeptide
MAADGYFPDWLEDNLSEGIREWWALKPGAPQPKANQQHQDNARGLVLPGYKYLGPGNGLDKGEPVNAADAAALEHDKAYDQQLKAGDNPYLKYNHADAEFQERLKEDTSFGGNLGRAVFQAKKRLLEPLGLVEEAAKTAPGKKRPVEQSPQEPDSSAGIGKSGAQPAKKRLNFGQTGDTESVPDPQPIGESPAAPSGVGSLTMASGGGAPVADNNEGADGVGSSSGNWHCDSQWLGDRVITTSTRTWALPTYNNHLYKQISNSTSGGSSNDNAYFGYSTPWGYFDFNRFHCHFSPRDWQRLINNNWGFRPKRLNFKLFNIQVKEVTDNNGVKTIANNLTSTVQVFTDSDYQLPYVLGSAHEGCLPPFPADVFMIPQYGYLTLNDGSQAVGRSSFYCLEYLPSQMLRTGNNFQFSYEFENVPFHSSYAHSQSLDRLMNPLIDQYLHYLSKTINGSGQNQQTLKFSVAGPSNMAVQGRNYIPGPSYRQQRVSTTVTQNNNSEFAWPGASSWALNGRNSLMNPGPAVASHKEGEDRFFPLSGSLIFGKQGTGRDNVDADKVMITNEEEIKTTNPVATESYGQVATNHQSAQAQAQTGWVQNQGILPGMVWQDRDVYLQGPIWAKIPHTDGNFHPSPLMGGFGMKHPPPQILIKNTPVPADPPTAFNKDKLNSFITQYSTGQVSVEIEWELQKENSKRWNPEIQYTSNYYKSNNVEFAVNTEGVYSEPRPIGTRYLTRNL

SEQ ID NO: 706 - protein, 736 aa, Artificial Sequence
  Synthetic polypeptide
MAADGYLPDWLEDNLSEGIREWWALKPGAPQPKANQQHQDNARGLVLPGYKYLGPGNGLDKGEPVNAADAAALEHDKAYDQQLKAGDNPYLKYNHADAEFQERLKEDTSFGGNLGRAVFQAKKRLLEPLGPVEEAAKTAPGKKRPVEQSPQEPDSSAGIGKSGAQPAKKRLNFGQTGDTESVPDPQPIGEPPAAPSGVGSLTMASGGGAPVADNNEGADGVGSSSGNWHCDSQWLGDRVITTSTRTWALPTYNNHLYKQISNSTSGGSSNDNAYFGYSTPWGYFDFNRFHCHFSPRDWQRLINNNWGFRPKRLNFKLFNIQVKEVTDNNGVKTIANNLTSTVQVFTDSDYQLPYVLGSAHEGCLPPFPADVFMIPQYGYLTLNDGSQAVGRSSFYCLEYFPSQMLRTGNNFQFSYEFENVPFHSSYAHSQSLDRLMNPLIDQYLYYLSKTINGSGQNQQTLKFSVAGPSNMAVQGRNYIPGPSYRQQRVSTTVTQNNNSEFAWPGASSWALNGRNSLMNPGPAMASHKEGEDRFFPLSGSLIFGKQGTGRDNVDADKVMITNEEEIKTTNPVATESYGQAATNHQSAQAQAQTGWVQNQGILPGMVWQDRDVYLQGPIWAKIPHTDGNFHPSPLMGGFGMKHPPPQILIKNTPVPADPPTAFNKDKLNSFITQYSTGQVSVEIEWELQKENSKRWNPEIQYTSNYYKSNNVEFAVNTEGVYSEPRPIGTRYLTRNL

SEQ ID NO: 707 - protein, 736 aa, Artificial Sequence
  Synthetic polypeptide
MAADGYLPDWLEDNLSEGIREWWALKPGAPQPKANQQHQDNARGLVLPGYKYLGPGNGLDKGEPVNAADAAALEHDKAYDQQLKAGDNPYLKYNHADAEFQERLKEDTSFGGNLGRAVFQAKKRLLEPLGPVEEAAKTAPGKKRPVEQSPQEPDSSAGIGKSGAQPAKKRLNFGQTGDTESVPDPQPIGEPPAAPSGVGSLTMASGGGAPVADNNEGADGVGSSSGNWHCDSQWLGDRVITTSTRTWALPTYNNHLYKQISNSTSGGSSNDNAYFGYSTPWGYFDFNRFHCHFSPRDWRRLINNNWGFRPKRLNFKLFNIQVKEVTDNNGVKTIANNLTSTVQVFTDSDYQLPYVLGSAHEGCLPPFPADVFMIPQYGYLTLNDGSQAVGRSSFYCLEYFPSQMLRTGNNFQFSYEFENVPFHSSYAHSQSLDRLMNPLIDQYLYYLSKTINGSGQNQQTLKFSVAGPSNMAVQGRNYIPGPSYRQQRVSTTVTQNNNSEFAWPGASSWALNGRNSLMNPGPAMASHKEGEDRFFPLSGSLIFGKQGTGRDNVDADKVMITNEEEIKTTNPVATESYGQVATNHQSAQAQAQTGWVQNQGILPGMVWQDRDVYLQGPIWAKIPHTDGNFHPSPLMGGFGMKHPPPQILIKNTPVPADPPTAFNKDKLNSFITQYSTGQVSVEIEWELQKENSKRWNPEIQYTSNYYKSNNVEFAVNTEGVYSEPRPIGTRYLTRNL

SEQ ID NO: 708 - protein, 736 aa, Artificial Sequence
  Synthetic polypeptide
MAADGYLPDWLEDNLSEGIREWWALKPGAPQPKANQQHQDNARGLVLPGYKYLGPGNGLDKGEPVNAADAAALEHDKAYDQQLKAGDNLYLKYNHADAEFQERLKEDTSFGGNLGRAVFQAKKRLLEPLGLVEEAAKTAPGKKRPVEQSPQEPDSSAGIGKSGAQPAKKRLNFGQTGDTESVPDPQPIGEPPAAPSGVGSLTMASGGGAPVADNNEGADGVGSSSGNWHCDSQWLGDRVITTSTRTWALPTYNNHLYKQISNSTSGGSSNDNAYFGYSTPWGYFDFNRFHCHFSPRDWQRLINNNWGFRPKRLNFKLFNIQVKEVTDNNGVKTIANNLTSTVQVFTDSDYQLPYVLGSAHEGCLPPFPADVFMIPQYGYLTLNDGSQAVGRSSFYCLEYFPSQMLRTGNNFQFSYEFENVPFHSSYAHSQSLDRLMNPLIDQYLHYLSKTINGSGQNQQTLKFSVAGPSNMAVQGRNYIPGPSYRQQRVSTTVTQNNNSEFAWPGASSWALNGRNSLMNPGPAMASHKEGEDRFFPLSGSLIFGKQGTGRDNVDADKVMITNEEEIKTTNPVATESYGQVATNHQSAQAQAQTGWVQNQGILPGMVWQDRDVYLQGPIWAKIPHTDGNFHPSPLMGGFGMKHPPPQILIKNTPVPADPPTAFNKDKLNSFITQYSTGQVSVEIEWELQKENSKRWNPEIQYTSNYYKSNNVEFAVNTEGVYSEPRPIGTRYLTRNL

SEQ ID NO: 709 - protein, 736 aa, Artificial Sequence
  Synthetic polypeptide
MAADGYLPDWLEDNLSEGIREWWALKPGAPQPKANQQHQDNARGLVLPGYKYLGPGNGLDKGEPVNAADAAALEHDKAYDQQLKAGDNPYLKYNHADAEFQERLKEDTSFGGNLGRAVFQAKKRLLEPLGLVEEAAKTAPGKKRPVEQSPQEPDSSAGIGKSGAQPAKKRLNFGQTGDTESVPDPQPIGEPPAAPSGVGSLTMASGGGAPVADNNEGADGVGSSSGNWHCDSQWLGDRVITTSTRTWALPTYNNHLYKQISNSTSGGSSNDNAYFGYSTPWGYFDFNRFHCHFSPRDWQRLINNNWGFRPKRLNFKLFNIQVKEVTDNNGVKTIANNLTSTVQVFTDSDYQLPYVLGSAHEGCLPPFPADVFMIPQYGYLTLNDGSQAVGRSSFYCLEYFPSQMLRTGNNFQFSYEFENVPFHSSYAHSQSLDRLMNPLIDQYLHYLSKTINGSGQNQQTLKFSVAGPSNMAVQGRNYIPGPSYRQQRVSTTVTQNNNSEFAWPGASSWALNGRNSLMNPGPAMASHKEGEDRFFPLSGSLIFGKQGTGRDNVDADKVMITNEEEIKTTNPVATESYGQVATNHQSAQAQAQTGWVQNQGILPGMVWQDRDVYLQGPIWAKIPHTDGNFHPSPLMGGFGMKHPPPQILIKNTPVPADPPTAFNKDKLNSFITQYSTGQVSVEIEWELQKENSKRWNPEIQYTSNYYKSNNVEFAVNTEGVYSEPRPIGTRYLTRNL

SEQ ID NO: 710 - protein, 736 aa, Artificial Sequence
  Synthetic polypeptide
  MOD_RES (442)..(442): Any amino acid
MAADGYLPDWLEDNLSEGIREWWALKPGAPQPKANQQHQDNARGLVLPGYKYLGPGNGLDKGEPVNAADAAALEHDKAYDQQLKAGDNPYLKYNHADAEFQERLKEDTSFGGNLGRAVFQAKKRLLEPLGLVEEAAKTAPGKKRPVEQSPQEPDSSAGIGKSGAQPAKKRLNFGQTGDTESVPDPQPIGEPPAAPSGVGSLTMASGGGAPVADNNEGADGVGSSSGNWHCDSQWLGDRVITTSTRTWALPTYNNHLYKQISTSTSGGSSNDNAYFGYSTPWGYFDFNRFHCHFSPRDWQRLINNNWGFRPKRLNFKLFNIQVKEVTDNNGVKTIANNLTSTVQVFTDSDYQLPYVLGSAHEGCLPPFPADVFMIPQYGYLTLNDGSQAVGRSSFYCLEYFPSQMLRTGNNFQFSYEFENVPFHSSYAHSQSLDRLMNPLIDXYLHYLSKTINGSGQNQQTLKFSVAGPSNMAVQGRNYIPGPSYRQQRVSTTVTQNNNSEFAWPGASSWALNGRNSLMNPGPAMASHKEGEDRFFPLSGSLIFGKQGTGRDNVDADKVMITNEEEIKTTNPVATESYGQVATNHQSAQAQAQTGWVQNQGILPDMVWQDRDVYLQGPIWAKIPHTDGNFHPSPLMGGFGMKHPPPQILIKNTPVPADPPTAFNKDKLNSFITQYSTGQVSVEIEWELQKENSKRWNPEIQYTSNYYKSNNVEFAVNTEGVYSEPRPIGTRYLTRNL

SEQ ID NO: 711 - protein, 736 aa, Artificial Sequence; identical to SEQ ID NO: 691
  Synthetic polypeptide

SEQ ID NO: 712 - protein, 736 aa, Artificial Sequence; identical to SEQ ID NO: 695
  Synthetic polypeptide

SEQ ID NO: 713 - protein, 736 aa, Artificial Sequence
  Synthetic polypeptide
MAADGYLPDWLEDNLSEGIREWWALKPGAPQPRANQQHQDNARGLVLPGYKYLGPGNGLDKGEPVNAADAAALEHDKAYDQQLKAGDNPYLKYNHADAEFQERLKEDTSFGGNLGRAVFQAKKRLLEPLGLVEEAAKTAPGKKRPVEQSPQEPDSSAGIGKSGAQPAKKRLNFGQTGDTESVPDPQPIGEPPAAPSGVGSLTMASGGGAPVADNNEGADGVGSSSGNWHCDSQWLGDRVITTSTRTWALPTYNNHLYKQISNSTSGGSSNDNAYFGYSTPWGYFDFNRFHCHFSPRDWQRLINNNWGFRPKRLNFKLFNIQVKEVTDNNGVKTIANNLTSTVQVFTDSDCQLPYVLGSAHEGCLPPFPADVFMIPQYGYLTLNDGSQAVGRSSFYCLEYFPSQMLRTGNNFQFSYEFENVPFHSSYAHSQSLDRLTNPLIDQYLYYLSKTINGSGQNQQTLKFSVAGPSNMAVQGRNYIPGPSYRQQRVSTTVTQNNNSEFAWPGASSWALNGRNSLMNPGPAMASHKEGEDRFFPLSGSLIFGKQGTGRDNVDADKVMITNEEEIKTTNPVATESHGQVATNHQSAQAQAQTGWVQNQGILPGMVWQDRDVYLQGPIWAKIPHTDGNFHPSPLMGGFGMKHPPPQILIKNTPVPADPPTAFNKDKLNSFITQYSTGQVSVEIEWELQKENSKRWNPEIQYTSNYYKSNNVEFAVNTEGVYSEPRPIGTRYLTRNL

SEQ ID NO: 714 - protein, 736 aa, Artificial Sequence
  Synthetic polypeptide
MAADGYLPDWLEDNLSEGIREWWALKPGAPQPKANQQHQDNARGLVLPGYKYLGPGNGLDKGEPVNAADAAALEHDKAYDQQLKAGDNPYLKYNHADAEFQERLKEDTSFGGNLGRAVFQAKKRLLEPLGLVEEAAKTAPGKKRPVEQSPQEPDSSAGIGKSGAQPAKKRLNFGQTGDTESVPDPQPIGEPPAAPSGVGSLTMASGGGAPVADNNEGADGVGSSSGNWHCDSQWLGDRVITTSTRTWALPTYNNHLYKQISNSTSGGSSNDNAYFGYSTPWGYFDFNRFHCHFSPRDWQRLINNNWGFRPKRLNFKLFNIQVKEVTDNNGVKTIANNLTSTVQVFTDSDYQLPYVLGSAHEGCLPPFPADVFMIPQYGYLTLNDGSQAVGRSSFYCLEYFPSQMLRTGNNFQFSYEFENVPFHSSYAHSQSLDRLMNPPIDQYLYYLSKTINGSGQNQQTLKFSVAGPSNMAVQGRNYIPGPSYRQQRVSTTVTQNNNSEFAWPGASSWALNGRNSLMNPGPAMASHKEGEDRFFPLSGSLIFGKQGTGRDNVDADKVMITNEEEIKTTNPVATESYGQVATNHQSAQAQAQTGWVQNQGILPGMVWQDRDVYLQGPIWAKIPHTDGNFHPSPLMGGFGMKHPPPQILIKNTPVPADPPTAFNKDKLNSFITQYSTGQVSVEIEWELQKENSKRWNPEIQYTSNYYKSNNVEFAVNTEGVYGEPRPIGTRYLTRNL

SEQ ID NO: 715 - protein, 736 aa, Artificial Sequence
  Synthetic polypeptide
MAADGYLPDWLEDNLSEGIREWWALKPGAPQPKANQQHQDNARGLVLPGYKYLGPGNGLDKGEPVNAADAAALEHDKAYDQQLKAGDNPYLKYNHADAEFQERLKEDTSFGGNLGRAVFQAKKRLLEPLGLVEEAAKTAPGKKRPVEQSPQEPDSSAGIGKSGAQPAKKRLNFGQTGDTESVPDPQPIGEPPAAPSGVGSLTMASGGGAPVADNNEGADGVGSSSGNWHCDSQWLGDRVITTSTRTWALPTYNNHLYKQISNSTSGGSSNDNAYFGYSTPWGYFDFNRFHCHFSPRDRQRLINNNWGFRPKRLNFKLFNIQVKEVTDNNGVKTIANNLTSTVQVFTDSDYQLPYVLGSAHEGCLPPFPADVFMIPQYGYLTLNDGSQAVGRSSFYCLEYFPSQMLRTGNNFQFSYEFENVPFHSSYAHSQSLDRLMNPLIDQYLYYLSKTINGSGQNQQTLKFSVAGPSNMAVQGRNYIPGPSYRQQRVSTTVTQNNNSEFAWPGASSWALNGRNSLMNPGPAMASHKEGEDRFFPLSGSLIFGKQGTGRDNVDADKVMITNEEEIKTTNPVATESYGQVATNHQSAQAQAQTGWVQNQGILPGMVWQDRDVYLQGPIWAKIPHTDGNFHPSPLMGGFGMKHPPPQILIKNTPVPADPPTAFNKDKLNSFITQYSTGQVSVEIEWELQKENSKRWNPEIQYTSNYYKSNNVEFAVNTEGVYSEPRPIGTRYLTRNL

SEQ ID NO: 716 - protein, 736 aa, Artificial Sequence
  Synthetic polypeptide
MAADGYLPDWLEDNLSEGIREWWALKPGAPQPKANQQHQDNARGLVLPGYKYLGPGNGLDKGEPVNAADAAALEHDKAYDQQLKAGDNPYLKYNHADAEFQERLKEDTSFGGNLGRAVFQAKKRLLEPLGLVEEAAKTAPGKKRPVEQSPQEPDSSAGIGKSGAQPAKKRLNFGQTGDTESVPDPQPIGEPPAAPSGVGSLTMASGGGAPVADNNEGADGVGSSSGNWHCNSQWLGDRVITTSTRTWALPTYNNHLYKQISNSTSGGSSNDNAYFGYSTPWGYFDFNRFHCHFSPRDWQRLINNNWGFRPKRLNFKLFNIQVKEVTDNNGVKTIANNLTSTVQVFTDSDYQLPYVLGSAHEGCLPPFPADVFMIPQYGYLTLNDGSQAVGRSSFYCLEYFPSQMLRTGNNFQFSYEFENVPFHSSYAHSQSLDRLMNPLIDQYLYYLSKTINGSGQNQQTLKFSVAGPGNMAVQGRNYIPGPSYRQQRVSTTVTQNNNSEFAWPGASSWALNGRNSLMNPGPAMASHKEGEDRFFPLSGSLIFGKQGTGRDNVDADKVMITNEEEIKTTNPVATESYGQVATNHQSAQAQAQTGWVQNQGILPGMVWQDRDVYLQGPIWAKIPHTDGNFHPSPLMGGFGMKHPPPQILIKNTPVPADPPTAFNKDKLNSFITQYSTGQVSVEIEWELQKENSKRWNPEIQYTSNYYKSNNVEFAVNTEGVYSEPRPIGTRYLTRNL

SEQ ID NO: 717 - protein, 736 aa, Artificial Sequence
  Synthetic polypeptide
MAADGYLPDWLEDNLSEGIREWWALKPGAPQPKANQQHQDNARGLVLPGYRYLGPGNGLDKGEPVNAADAAALEHDKAYDQQLKAGDNPYLKYNHADAEFQERLKEDTSFGGNLGRAVFQAKKRLLEPLGLVEEAAKTAPGKKRPVEQSPQEPDSSAGIGKSGAQPAKKRLNFGQTGDTESVPDPQPIGEPPAAPSGVGSLTMASGGGAPVADNNEGADGVGSSSGNWHCDSQWLGDRVITTSTRTWALPTYNNHLYKQISNSTSGGSSNDNAYFGYSTPWGYFDFNRFHCHFSPRDWQRLINNNWGFRPKRLNFKLFNIQVKEVTDNNGVKTVANNLTSTVQVFTDSDYQLPYVLGSAHEGCLPPFPADVFMIPQYGYLTLNDGSQAVGRSSFYCLEYFPSQMLRTGNNFQFSYEFENVPFHSSYAHSQSLDRLMNPLIDQYLYYLSKTINGSGQNQQTLKFSVAGPSNMAVQGRNYIPGPSYRQQRVSTTVTQNNNSEFAWPGASSWALNGRNSLMNPGPAMASHKEGEDRFFPLSGSLIFGKQGTGRDNVDADKVMITNEEEIKTTNPVATESYGQVATNHQSAQAQAQTGWVQNQGILPGMVWQDRDVYLQGPIWAKIPHTDGNFHPSPLMGGFGMKHPPPQILIKNTPVPADPPTAFNKDKLNSFITQYSTGQVSVEIEWELQKENSKRWNPEIQYTSNYYKSNNVEFAVNTEGVYSGPRPIGTRYLTRNL

SEQ ID NO: 718 - protein, 736 aa, Artificial Sequence; identical to SEQ ID NO: 128
  Synthetic polypeptide

SEQ ID NO: 719 - protein, 736 aa, Artificial Sequence
  Synthetic polypeptide
MAADGYLPDWLEDNLSEGIREWWALKPGAPQPKANQQRQDNARGLVLPGYKYLGPGNGLDKGEPVNAADAAALEHDKAYDQQLKAGGNPCLKYNHADAEFQERLKEDTSFGGNLGRAVFQAKKRLLEPLGLVEEAAKTAPGKKRPVEQSPQEPDSSAGIGRSGAQPAKKRLNFGQTGDTESVPDPQPIGEPPAAPSGVGSLTMASGGGAPVADNNEGADGVGSSSGNWHCDSQWLGDRVITTSTRTWALPTYNNHLYKQISNSTSGGSSNDNAYFGYSTPWGYFDFNRFHCHFSPRDWQRLINNNWGFRPKRLNFKLFNIQVKEVTDNNGVKAIANNLTSTVQVFTDSDYQLPYVLGSAHEGCLPPFPADVFMIPQYGYLTLNDGSQAVGRSSFYCLEYFPSQMLRTGNNFQFSYEFENVPFHSSYAHSQSLDRLMNPLIDQYLYYLSKTIDGSGQNQQTLKFSVAGPSNMAVQGRNYIPGPSYRQQRVSTTVTQNNNSEFAWPGASSWALNGRNSLMDPGPAMASHKEGEDRFFPLSGSLIFGKQGTGRDNVDADKVMITNEEEIKTTNPVATESYGQVATNHQSAQAQAQTGWVQNQGILPGMVWQDRDVYLQGPIWAKIPHTGGNFHPSPLMGGFGMKHPPPQILIKNTPVPADPPTAFNKDKLNSFITQYSTGQVSVEIEWELQKENSKRWNPEIQYTSNYYKSNNVEFAVNTEGVYSEPRPIGTRYLTRNL

SEQ ID NO: 720 - protein, 736 aa, Artificial Sequence
  Synthetic polypeptide
MAADGYLPDWLEDNLSEGIREWWALKPGAPQPKANQQHQDNARGLVLPGYKYLGPGNGLDKGEPVNAADAAALEHDKAYDQQLKAGDNPYLKYNHADAEFQERLKEDTSFGGNLGRAVFQAKKRLLEPLGLVEEAAKTAPGKKRPVEQSPQEPDSSAGIGKSGAQPAKKRLNFGQTGDTESVPDPQPIGEPPAAPSGVGSLTMASGGGAPVADNNEGADGVGSSSGNWHCDSQWLGDRVITTSTRTWALPTYNNHLYKQISNSTSGGSSNDNAYFGYSTPWGYFDFNRFHCHFSPRDWQRLINNNWGFRPKRLNFKLFNIQVKEVTDNNGVKTIANNLTSTVQVFTDSDYQLPYVLGSAHEGCLPPFPADVFMIPQYGYLTLNDGSQAVGRSSFYCLEYFPSQMLRTGNNFQFSYEFENVPFHSSYAHSQSLDRLMNPLIDQYLYYLSKTINGSGQNQQTLKFSVAGPSNMAVQGRNYIPGPSYRQQRVSTTVTQNNNSEFAWPGASSWALNGRNSLMNPGPAMASHKEGEDRFFPLSGSLIFGKQGTGRDNVDADKVMITNEEEIKTTNPVATESYGQVATNHQSAQAQAQTGWVQNQGILPGMVWQDRDVYLQGPIWAKIPHTDGNFHPSPLMGGFGMKHPPPQILIKNTPVPADPPTAFNKDKLNSFITQYSTGQVSVEIEWELQKENSKRWNPEIQYTSNYYKPNNVEFAVNTEGVYSEPRPIGTRYLTRNL

SEQ ID NO: 721 - protein, 736 aa, Artificial Sequence
  Synthetic polypeptide
MAADGYLPDWLEDNLSEGIREWWALKPGAPQPKANQQHQDNARGLVLPGYKYLGPGNGLDKGEPVNAADAAALEHNKAYDQQLKAGDNPYLKCNHADAEFQERLKEDTSFGGNLGRAVFQAKKRPLEPLGLVEEAAKTAPGKKRPVEQSPQEPDSSAGIGKSGAQPAKKRLNFGQTGDTESVPDPQPIGEPPAAPSGVRSLTMASGGGAPVADNNEGADGVGSSSGNWHCDSQWLGDRVITTSTRTWALPTYNNHLYKQISNSTSGGSSNDNAYLGYSTPWGYFDFNRFHCHFSPRDWQRLINNNWGFRPKRLNFKLFNIQVKEVTDNNGVKTIANNLTSTVQVFTDSDYQLPYVLGSAHEGCLPPFPADVFMIPQYGYLTLNDGSQAVGRSSFYCLEYFPSQMLRTGNNFQFSYEFENVPFHSSYAHSQSLDRLMNPLIDQYLYYLSKTINGSGQNQQTLKFSVAGPSNMAVQGRNYIPGPSYRQQRVSTTVTQNNNSEFAWPGASSWALNGRNSLMNPGPTMASHKEGEDRFFPLSGSLIFGKQGTGRDNVDADKVMITNEEEIKTTNPVATESYGQVATNHQSAQAQAQTGWVQNQGILPGMVWQDRDVYLQGPIWAKIPHTDGNFHPSPLMGGFGMKHPPPQILIKNTPVPADPPTAFNKDKLNSFITQYSTGQVSVEIEWELQKENSKRWNPEIQYTSNYYKSNNVEFAVNTEGVYSEPRPIGTRYLTRNL

SEQ ID NO: 722 - protein, 736 aa, Artificial Sequence
  Synthetic polypeptide
MAADGYLPDWLEDNLSEGIREWWALKPGAPQPKANQQHQDNARGLVLPGYKYLGPGNGLDKGEPVNAADAAALVHDKAYDQQLKAGDNPYLKCNHADAEFQERLKEDTSFGGNLGRAVFQAKKRLLEPLGLVEEAAKTAPGKKRPVEQSPQEPDSSAGIGKSGAQPAKKRLNFGQTGDTESVPDPQPIGEPPAAPSGVGSLTMASGGGAPVADNNEGADGVGSSSGNWHCDSQWLGDRVITTSTRTWALPTYNNHLYKQISNSTSGGSSNDNAYLGYSTPWGYFDFNRFHCHFSPRDWQRLINNNWGFRPKRLNFKLFNIQVKEVTDNNGVKTIANNLTSTVQVFTDSDYQLPYVLGSAHEGCLPPFPADVFTIPQYGYLTLNDGSQAVGRSSFYCLEYFPSQMLRTGNNFQFSYEFENVPFHSSYAHSQSLDRLMNPLIDQYLYYLSKTINGSGQNQQTLKFSVAGPSNMAVQGRNYIPGPSYRQQRVSTTVTQNNNSEFAWPGASSWALNGRNSLMNPGPAMASHKEGEDRFFPLSGSLIFGKQGTGRDNVDADKVMITNEEEIKTTNPVATESYGQVATNHQSAQAQAQTGWVQNQGILPGMVWQDRDVYLQGPIWAKIPHTDGNFHPSPLMGGFGMKHPPPQILIKNTPVPADPPTAFNKDKLNSFITQYSTGQVSVEIEWELQKENSKRWNPEIQYTSNYYKSNNVEFAVNTEGVYSEPRPIGPRYLTRNF

SEQ ID NO: 723 - protein, 736 aa, Artificial Sequence
  Synthetic polypeptide
MAADGYLPDWLEDNLSEGIREWWALKPGAPQPKANQQHQDNARGLVLPGYKYLGPGNGLDKGEPVNAADAAALEHNKAYDQQLKAGDNPYLKCNHADAEFQERLKEDTSFGGNLGRAVFQAKKRLLEPLGLVEEAAKTAPGKKRPVEQSPQEPDSSAGIGKSGAQPAKKRLNFGQTGDTESVPDPQPIGEPPAAPSGVRSLTMASGGGAPVADNNEGADGVGSSSGNWHCDSQWLGDRVITTSTRTWALPTYNNHLYKQISNSTSGGSSNDNAYLGYSTPWGYFDFNRFHCHFSPRDWQRLINNNWGFRPKRLNFKLFNIQVKEVTDNNGVKTIANNLTSTVQVFTDSDYQLPYVLGSAHEGCLPPFPADVFMIPQYGYLTLNDGSQAVGRSSFYCLEYFPSQMLRTGNNFQFSYEFENVPFHSSYAHSQSLDRLMNPLIDQYLYYLSKTINGSGQNQQTLKFSVAGPSNMAVQGRNYIPGPSYRQQRVSTTVTQNNNSEFAWPGASSWALNGRNSLMNPGPAMASHKEGEDRFFPLSGSLIFGKQGTGRDNVDADKVMITNEEEIKTTNPVATESYGQVATNHQSAQAQAQTGWVQNQGILPGMVWQDRDVYLQGPIWAKIPHTDGNFHPSPLMGGFGMKHPPPQILIKNTPVPADPPTAFNKDKLNSFITQYSTGQVSVEIEWELQKENSKRWNPEIQYTSNYYKSNNVEFAVNTEGVYSEPRPIGTRYLTRNL

SEQ ID NO: 724 - protein, 736 aa, Artificial Sequence
  Synthetic polypeptide
MAADGYLPDWLEDNLSEGIREWWALKPGAPQPKANQQHQDNARGLVLPGYKYLGPGNGLDKGEPVNAADAAALEHDKAYDQQLKAGDNPYLKCNHADAEFQERLKEDTSFGGNLGRAVFQAKKRLLEPLGLVEEAAKTAPGKKRPVEQSPQEPDSSAGIGKSGAQPAKKRLNFGQTGDTESVPDPQPIGEPPAAPSGVGSLTMASGGGAPVADNNEGADGVGSSSGNWHCDSQWLGDRVITTSTRTWALPTYNNHLYKQISNSTSGGSSNDNAYLGYSTPWGYFDFNRFHCHFSPRDWQRLINNNWGFRPKRLNFELFNIQVKEVTDNNGVKTIANNLTSTVQVFTDSDYQLPYVLGSAHEGCLPPFPADVFMIPQYGYLTLNDGSQAVGRSSFYCLEYFPSQMLRTGNNFQSSYEFENVPFHSSYAHSQSLDRLMNPLIDQYLYYLSKTINGSGQNQQTLKFSVAGPSNMAVQGRNYIPGPSYRQQRASTTVTQNNNSEFAWPGASSWALNGRNSLMNPGPAMASHKEGEDRFFPLSGSLIFGKQGTGRDNVDADKVMITNEEEIKTTNPVATESYGQVATNHQSAQAQAQTGWVQNQGILPGMVWQDRDVYLQGPIWAKIPHTDGNFHPSPLMGGFGMKHPPPQILIKNTPVPADPPTAFNKDKLNSFITQYSTGQVSVEIEWELQKENSKRWNPEIQYTSNYYKSNNVEFAVNTEGVYSEPRPIGTRYLTRNL

SEQ ID NO: 725 - protein, 736 aa, Artificial Sequence
  Synthetic polypeptide
MAADGYLPDWLEDNLSEGIREWWALKPGAPQPKANQQHQDNARGLVLPGYKYLGPGNGLDKGEPVNAADAAALEHDKAYDQQLKAGDNPYLKCNHADAEFQERLKEDTSFGGNLGRAVFQAKKRLLEPLGLVEEAAKTAPGKKRPVEQSPQEPDSSAGIGKSGAQPAKKRLNFGQTGDTESVPDPQPIGEPPAAPPGVGSLTMASGGGAPVADNNEGADGVGSSSGNWHCDSQWLGDRVITTSTRTWALPTYNNHLYKQISNSTSGGSSNDNAYLGYSTPWGYFDFNRFHCHFSPRDWQRLINNNWGFRPKRLNFKLFNIQVKEVTDNNGVKTIANNLTSTVQVFTDSDYQLPYVLGSAHEGCLPPFPADVFMIPQYGYLTLNDGSQAVGRSSFYCLEYFPSQMLRTGNNFQFSYEFENVPFHSSYAHSQSLDRLMNPLIDQYLYYLSKTISGSGQNQQTLKFSVAGPSNMAVQGRNYIPGPSYRQQRVSTTVTQNNSSEFAWPGASSWALNGRNSLMNPGPAMASHKEGEDRFFPLSGSLIFGKQGTGRDNVDADKVMITNEEEIKTTNPVATESYGQVATNHQSAQAQAQTGWVQNQGILSGMVWQDRDVYLQGPIWAKIPHTDGNFHPSPLMGGFGMKHPPPQILIKNTPVPADPPTAFNKDKLNSFITQYSTGQVSVEIEWELQKENSKRWNPEIQYTSNYYKSNNVEFAVNTEGVYSEPRPIGTRYLTRNL

SEQ ID NO: 726 - protein, 736 aa, Artificial Sequence
  Synthetic polypeptide
MAADGYLPDWLEDNLSEGIREWWALKPGAPQPKANQQHQDNARGLVLPGYKYLGPGNGLDKGEPVNAADAAALEHDKAYDQQLKAGDNPYLKCNHADAEFQERLKEDTSFGGNLGRAVFQAKKRLLEPLGLVEEAAKTAPGKKRPVEQSPQEPDSSAGIGKSGAQPAKKRLNFGQTGDTESVPDPQPIGEPPAAPSGVGSLTMASGGGAPVADNNEGADGVGSSSGNWHCDSQWLGDRVITTSTRTWALPTYNNHLYKQISNSTSGGSSNDNAYLGYSTPWGYFDFNRFHCHFSPRDWQRLINNNWGFRPKRLNFKLFNIQVKEVTDNNGVKTIANNLTSTVQVFTDSDYQLPYVLGSAHEGCLPPFPADVFMIPQYGYLTLNDGSQAVGRSSFYCLEYFPSQMLRTGNNFQFSYEFENVPFHSSYAHSQSLDRLMNPLIDQYLYYLSKTINGSGQNQQTLKFSVAGPSNMAVQGRNYIPGPSYRQQRVSTTVTQNNNSEFAWPGASSWALNGRNSLMNPGPAMASHKEGEDRFFPLSGSLIFGKQGTGRDNVDADKVMITNEEEIKTTNPVATESYGQVATNHQSAQAQAQTGWVQNQGILPGMVWQDRDVYLQGPIWAKIPHTDGNFHPSPLMGGFGMKHPPPQILIKNTPVPADPPTAFNKDKLNSFITQYSTGQVSVEIEWELQKENSKRWNPEIQYTSNYYKSNNVEFAVNTEGVYSEPRPIGTRYLTRNL

SEQ ID NO: 727 - protein, 736 aa, Artificial Sequence; identical to SEQ ID NO: 726
  Synthetic polypeptide

SEQ ID NO: 728 - protein, 736 aa, Artificial Sequence
  Synthetic polypeptide
MAADGYLPDWLEDNLSEGIREWWALKPGAPQPKANQQHQDNARGLVLPGYKYLGPGNGLDKGEPVNAADAAALEHDKAYDQQLKAGDNPYLKCNHADAEFQERLKEDTSFGGNLGRAVFQAKKRLLEPLGLVEEAAKTAPGKKRPVEQSPQEPDSSAGIGKSGAQPAKKRLNFGQTGDTESVPDPQPIGEPPAAPSGVGSLTMASGGGAPVADNNEGADGVGSSSGNWHCDSQWLGDRVITTSTRTWALPTYNNHLYKQISNSTSGGSSNDNAYLDYSTPWGYFDFNRFHCHFSPRDWQRLINNNWGFRPKRLNFKLFNIQVKEVTDNNGVKTIANNLTSTVQVFTDSDYQLPYVLGSAHEGCLPPFPADVFMIPQYGYLTLNDGSQAVGRSSFYCLEYFPSQMLRTGNNFQFSYEFENVPFHSSYAHSQSLDRLMNPLIDQYLYYLSKTINGSGQNQQTLKFSVAGPSNMAVQGRNYIPGPSYRQQRVSTTVTQNNNSEFAWPGASSWALNGRNSLMNPGPAMASHKEGEDRFFPLSGSLIFGKQGTGRDNVDADKVMITNEEEIKTTNPVATESYGQVATNHQSAQAQAQTGWVQNQGILPGMVWQGRDVYLQGPIWAKIPHTDGNFHPSPLMGGFGMKHPPPQILIKNTPVPADPPTAFNKDKLNSFITQYSTGQVSVEIEWELQKENSKRWNPEIQYTSNYYKSNNVEFAVNTEGVYSEPRPIGTRYLTRNL

SEQ ID NO: 729 - protein, 736 aa, Artificial Sequence; identical to SEQ ID NO: 726
  Synthetic polypeptide

SEQ ID NO: 730 - protein, 736 aa, Artificial Sequence
  Synthetic polypeptide
MAADGYPPDWLEDNLSEGIREWWALKPGAPQPKANQQHQDNARGLVLPGYKYLGPGNGLDKGEPVNAADAAALEHDKAYDQQLKAGDNPHLKYNHADAEFQERLKEDTSFGGNLGRAVFQAKKRLLEPLGLVEEAAKTAPGKKRPVEQSPQEPDSSAGIGKSGAQPAKKRLNFGQTGDTESVPDPQPIGEPPAAPSGVGSLTMASGGGAPVADNNEGADGVGSSSGNWHCDSQWLGDRVITTSTRTWALPTYNNHLYKQISNSTSGGSSNDNAYFGYSTPWGYFDFNRFHCHFSPRDWQRLINNNWGFRPKRLNFKLFNIQVKEVTDNNGVKTIANNLTSTVQVFTDSDYQLPYVLGSAHEGCLPPFPADVFMIPQYGYLTLNDGSQAVGRSSFYCLEYFPSQMLRTGNNFQFSYEFENVPFHSSYAHSQSLDRLMNPLIDQYLYYLSKTINGSGQNQQTLKFSVAGPSNMAVQGRNYIPGPSYRQQRVSTTVTQNNNSEFAWPGASSWALNGRNSLMNPGPAMASHKEGEDRFFPLSGSLIFGKQGTGRDNVDADKVMITNEEEIKTTNPVATESYGQVATNHQSAQAQAQTGWVQNQGILPGMVWQDRDVYLQGPIWAKIPHTDGNFHPSPLMGGFGVKHPPPQILIKNTPVPADPPTAFNKDRLNSFITQYSTGQVSVEIEWELQKENSKRWNPEIQYTSNYYKSNNVEFAVNTEGVYSEPRPIGTRYLTRNL

SEQ ID NO: 731 - protein, 736 aa, Artificial Sequence
  Synthetic polypeptide
MAADGYLPDWLEDNLSEGIREWWALKPGAPQPKANQQHQDNARGLVLPGYKYLGPGNGLDKGEPVNAADAAALEHDKAYDQQLKAGDNPYLKYNHADAEFQERLKEDTSFGGNLGRAVFQAKKRLLEPLGLVEEAAKTAPGKKRPVEQSPQEPDSSAGIGKSGAQPAKKRLNFGQTGDTESVPDPQPIGEPPAAPSGVGSLTMASGGGAPVADNNEGADGVGSSSGNWHCDSQWLGDRVITTSTRTWALPTYNNHLYKQISNSTSGGSSNDNAYFGYSTPWGYFDFNRFHCHFSPRDWQRLINNNWGFRPKRLNFKLFNIQVKEVTDNNGVKTIANNLTSTVQVFTDSDYQLPYVLGSAHEGCLPPFPADVFMIPQYGYLTLNDGSQAVGRSSFYCLEYFPSQMLRTGNNFQFSYEFENVPFHSSYAHSQSLDRLMNPLIDQYLYYLSKTINGSGQNQQTLKFSVAGPSNMAVQGRNYIPGPSYRQQRVSTTVTQNNNSEFAWPGASSWALNGRNSLMNPGPAMASHKEGEDRFFPLSGSLIFGKQGTGRDNVDADKVMITNEEEIKTTNPVATESYGQVATNHQSAQAQAQTGWVQNQGILPGMVWQDRDVYLQGPIWAKIPHTDGNFHPSPLMGGFGVKHPPPQILIKNTPVPADPPTAFNKDKLNSFITQYSTGQVSVEIEWELQKENSKRWNPEIQYTSNYYKSNNVEFAVNTEGVYSEPRPIGTRYLTRNL

SEQ ID NO: 732 - protein, 736 aa, Artificial Sequence
  Synthetic polypeptide
MAADGYLPDWLEDNLSEGIREWWALKPGAPQPKANQQHQDNARGLVLPGYKYLGPGNGLDKGEPVNAADAAALEHDKAYDQQLKAGDNPYLKYNHADAEFQERLKEDTSFGGNLGRAVFQAKKRLLEPLGLVEEAAKTAPGKKRPVEQSPQEPDSSAGIGKSGAQPAKKRLNFGQTGDTESVPDPQPIGEPPAAPSGVGSLTMASGGGAPVADNNEGADGVGSSSGNWHCDSQWLGDRVITTSTRTWALPTYNNHLYKQISNSTSGGSSNDNAYFGYSTPWGYFDFNRFHCHFSPRDWQRLTNNNWGFRPKRLNFKLFNIQVKEVTDNNGVKTIANNLTSTVQVFTDSDYQLPYVLGSAHEGCLPPFPADVFMIPQYGYLTLNDGSQAVGRSSFYCLEYIPSQMLRTGNNFQFSYEFENVPFHSSYAHSQSLDRLMNPLIDQYLYYLSKTINGSGQNQQTLKFSVAGPSNMAVQGRNYIPGPSYRQQRVSTTVTQNNNSEFAWPGASSWALNGRNSLMNPGPAMASHKEGEDRFFPLSGSLIFGKQGTGRDNVDADKVMITNEEEIKTTNPVATESYGQVATNHQSAQAQAQTGWVQNQGILPGMVWQDRDVYLQGPIWAKIPHTDGNFHPSPLMGGFGVKHPPPQILIKNTPVPADPPTAFNKDKLNSFITQYSTGQVSVEIEWELQKENSKRWNPEIQYTSNYYKSNNVEFAVNTEGVYSEPRPIGTRYLTRNL

SEQ ID NO: 733 - protein, 736 aa, Artificial Sequence
  Synthetic polypeptide
MAADGYLPDWLEDNLSEGIREWWALKPGAPQPKANQQHQDNARGLVLPGYKYLGPGNGLDKGEPVNAADAAALEHDKAYDQQLKAGDNPYLKYNHADAEFQERLKEDTSFGGNLGRAVFQAKKRLLEPLGLVEEAAKTAPGKKRPVEQSPQEPDSSAGIGKSGAQPAKKRLNFGQTGDTESVPDPQPIGEPPAAPSGVGSLTMASGGGAPVADNNEGADGVGSSSGNWHCDSQWLGDRVITTSTRTWALPTYNNHLYKQISNSTSGGSSNDNAYFGYSTPWGYFDFNRFHCHFSPRDWQRLINNNWGFRPKRLNFKLFNIQVKEVTDNNGVKTIANNLTSTVQVFTDSDYQLPYVLGSAHEGCLPPFPADVFMIPQYGYLTLNDGSQAVGRSSFYCLEYFPSQMLRTGNNFQFSYEFENVPFHSSYAHSQSLDRLMNPLIDQYLYYLSKTINGSGQNQQTLKFSVAGPSNMAVQGRNYIPGPSYRQQRVSTTVTQNNNSEFAWPGASSWALNGRNSLMNPGPAMASHKEGEDRFFPLSGSLISGKQGTGRDNVDANKVMITNEEEIKTTNPVATESYGQVATNHQSAQAQAQTGWVQNQGILPGMVWQDRDVYLQGPIWAKIPHTDGNFHPSPLMGGFEMKHPPPQILIKNTPVPADPPTAFNKDKLNSFITQYSTGQVSVEIEWELQKENSKRWNPEIQYTSNYYKSNNVEFAVNTEGVYSEPRPIGTRYLTRNL

SEQ ID NO: 734 - protein, 736 aa, Artificial Sequence
  Synthetic polypeptide
MAADGYLPDWLEDNLSEGIREWWALKPGAPQPKANQQHQDNARGLVLPGYKYLGPGNGLDKGEPVNAADAAALEHDKAYDQQLKAGDNPYLKYNHADAEFQERLKEDTSFGGNLGRAVFQAKKRLLEPLGLVEEAAKTAPGKKRPVEQSPQEPDSSAGIGKSGAQPAKKRLNFGQTGDTESVPDPQPIGEPPAAPSGVGSLTIASGGGAPVADNNEGADGVGSSSGNWHCDSQWLGDRVITTSTRTWALPTYNNHLYKRISNSTSGGSSNDNAYFGYSTPWGYFDFNRFHCHFSPRDWQRLINNNWGFRPKRLNFKLFNIRVKEVTDNNGVKTITNNLTSTVQVFTDSDYQLPYVLGSAHEGCLPPFPADVFMIPQYGYLTLNDGSQAVGRSSFYCLEYFPSQMLRTGNNFQFSYEFENVPFHSSYAHSQSLDRLMNPLIDQYLYYLSKTINGSGQNQQTLKFSVAGPSNMAVQGRNYIPGPSYRQQRVSTTVTRNNNSEFAWPGASSWALNGRNSLMNPGPAMASHKEGEDRFFPLSGSLIFGKQGTGRDNVDADKVMITNEEEIKTTNPVATESYGQVATNHQSAQAQAQTGWVQNQGILPGMVWQDRDVYLQGPIWAKIPHTDGNFHPSPLMGGFGVKHPPPQILIKNTPVPADPPTAFNKDKLNSFITQYSTGQVSVEIEWELQKENSKRWNPEIQYTSNYYKSNNVEFAVNTEGVYSEPRPIGTRYLTRNL

SEQ ID NO: 735 - protein, 736 aa, Artificial Sequence
  Synthetic polypeptide
MAADGYLPDWLEDNLSEGIREWWALKPGAPQPKANQQHQDNARGLVLPGYKYLGPGNGLDKGEPVNAADAAALEHDKAYDQQLKAGDNPYLKYNHADAEFQERLKEDTSFGGNLGRAVFQAKKRLLEPLGLVEEAAKTAPGKKRPVEQSPQEPDSSAGIGKSGAQPAKKRLNFGQTGDTEPVPDPQPIGEPPAAPSGVGSLTMASGGGAPVADNNEGADGVGSSSGNWHCDSQWLGDRVITTSTRTWALPTYNNHLYKQISNSTSGGSSNDNAYFGYSTPWGYFDFNRFHCHFSPRDWQRLINNNWGFRPKRLNFKLFNIQVKEVTDNNGVKTIANNLTSTVQVFTDSDYQLPYVLGSAHEGCLPPFPAGVFMIPQYGYLTLNDGSQAVGRSSFYCLEYFPSQMLRTGNNFQFSYEFENVPFHSSYAHSQSLDRLMNPLIDQYLYYLSKTINGSGQNQQTLKFSVAGPSNMAVQGRNYIPGPSYRQQRVSTTATQNNNSEFAWPGASSWALNGRNSLMNPGPAMASHKEGEDRFFPLSGSLIFGKQGTGRDNVDADKVMITNEEEIKTTNPVATESYGQVATNHQSAQAQAQTGWVQNQGILPGMVWQDRDVYLQGPIWAKIPHTDGNFHPSPLMGGFGMKHPPPQILIKNTPVPADPPTAFNKDKLNSFITQYSTGQVSVEIEWELQKENSKRWNPEIQYTSNYYKSNNVEFAVNTEGVYSEPRPIGTRYLTRNL

SEQ ID NO: 736 - protein, 736 aa, Artificial Sequence
  Synthetic polypeptide
MAADGYLPDWLEDNLSEGIREWWALKPGAPQPKANQQHQDNARGLVLPGYKYLGPGNGLDKGEPVNAADAAALEHDKAYDQQLKAGDNPYLKYNHADAGFQERLKEDTSFGGNLGRAVFQAKKRLLEPLGLVEEAAKTAPGKKRPVEQSPQEPDSSAGIGKSGAQPAKKRLNFGQTGDTESVPVPQPIGEPPAAPSGVGSLTMASGGGAPVADNNEGADGVGSSSGNWHCDSQWLGDRVITTSTRTWALPTYNNHLYKQISNSTSGGSSNDNAYFGYSTPWGYFDFNRFHCHFSPRDWQRLINNNWGFRPKRLNFKLFNIQVKEVTDNNGVKTIANNLTSTVQVFTDSDYQLPYVLGSAHEGCLPPFPADVFMIPQYGYLTLNDGSQAVGRSSFYCLEYFPSQMLRTGNNFQFSYEFENVPFHSSYAHSQSLDRLMNPLIDQYLYYLSKTINGSGQNQQTLKFSVAGPSNMAVQGRNYIPGPSYRQQRVSTTVTQNNNSEFAWPGASSWALNGRNSLMNPGPAMASHKEGEDRFFPLSGSLIFGKQGAGRDNVDADKVMITNEEEIKTTNPVATESYGQVATNHQSAQAQAQTGWVQNQGILPGMVWQDRDVYLQGPIWAKIPHTDGNFHPSPLMGGFGMKHPPPQILIKNTPVPADPPTAFNKDKLNSFITQYSTGQVSVEIEWELQKENSKRWNPEIQYTSNYYKSNNVEFAVNTEGVYSEPRPIGTRYLTRNL

SEQ ID NO: 737 - protein, 736 aa, Artificial Sequence
  Synthetic polypeptide
  MOD_RES (126)..(126): Any amino acid
MAADGYLPDWLEDNLSEGIRERWALKPGAPQPKANQQHQDNARGLVLPGYKYLGPGNGLDKGEPVNAADAAALEHDKAYDQQLKAGDNPYLKYNHADAEFQERLKEDTSFGGNLGRAVFQAKKRLXEPLGLVEEAAKTAPGKKRPVEQSPQEPDSSAGIGKSGAQPAKKRLNFGQTGDTESVPDPQPIGEPPAAPSGVGSLTMASGGGAPVADNNEGADGVGSSSGNWHCDSQWLGDRVITTSTRTWALPTYNNHLYKQISNSTSGGSSNDNAYFGYSTPWGYFDFNRFHCHFSPRDWQRLINNNWGFRPKRLNFKLFNIQVKEVTDNNGVKTIANNLTSTVQVFTDSDYQLPYVLGSAHEGCLPPFPADVFMIPQYGYLTLNDGSQAVGRSSFYCLEYFPSQMLRTGNNFQFSYEFENVPFHSSYAHSQSPDRLMNPLIDQYLYYLSKTINGSGQNQQTLKFSVAGPSNMAVQGRNYIPGPSYRQQRVSTTVTQNNNSEFAWPGASSWALNGRNSLMNPGPAMASHKEGEDRFFPLSGSLIFGKQGTGRDNVDADKVMITNEEEIKTTNPVATESYGQVATNHQSAQAQAQTGWVQNQGILPGMVWQDRDVYLQGPIWAKIPHTDGNFHPSPLMGGFGVKHPPPQILIKNTPVPADPPTAFNKDKLNSFITQYSTGQVSVEIEWELQKENSKRWNPEIQYTSNYYKSNNVEFAVNTEGVYSEPRPIGTRYLTRNL

SEQ ID NO: 738 - protein, 736 aa, Artificial Sequence
  Synthetic polypeptide
MAADGYLPDWLEDNLSEGIREWWALKPGAPQPKANQQHQDNARGLVLPGYKYLGPGNGLDKGEPVNAADAAALEHDKAYDQQLKAGDNPYLKYNHADAEFQERLKEDTSFGGNLGRAVFQAKKRLLEPLGLVEEAAKTAPGKKRPVEQSPQEPDSSAGIGKSGAQPAKKRLNFGQTGDTESVPDPQPIGEPPAAPSGVGSLTMASGGGAPVADNNEGADGVGSSSGNWHCDSQWLGDRVITTSTRTWALPTYNNHLYKQISNSTSGGSSNDNAYLGYSTPWGYFDFNRFHCHFSPRDWQRLINNNWGFRPKRLNFKLFNIQVKEVTDNNGVKTIANNLTSTVQVFTDSDYQLPYVLGSAHEGCLPPFPADVFMIPQYGYLTLNDGSQAVGRSSFYCLEYFPSQMLRTGNNFQFSYEFENVPFHSSYAHSQSLDRLMNPLIDQYLYYLSKTINGSGQNQQTLKFSVAGPSNMAVQGRNYIPGPSYRQQRVSTTVTQNNNSEFAWPGASSWALNGRNSLMNPGPAMASHKEGEDRFFPLSGSLIFGKQGTGRDNVDADKVMITNEEEIKTTNPVATESYGQVATNHQSAQAQAQTGWVQNQGILPGMVWQDRDVYLQGPIWAKIPHTDGNFHPSPLMGGFGMKHPPPQILIKNTPVPADPPTAFNKDKLNSFITQYSTGQVSVEIEWELQKENSKRWNPEIQYTSNYYKSNNVEFAVNTEGVYSEPRPIGTRYLTRNL

SEQ ID NO: 739 - protein, 736 aa, Artificial Sequence
  Synthetic polypeptide
MAADGYLPDWLEDNLSEGIREWWALKPGAPQPKANQQHQDNARGLVLPGYKYLGPGNGLDKGEPVNAADAAALEHDKAYDQQLKAGDNPYLKYNHADAEFQERLKEDTSFGGNLGRAVFQAKKRLLEPLGLVEEAAKTAPGKKRPVEQSPQEPDSSAGIGKSGAQPAKKRLNFGQTGDTESVPDPQPIGEPPAAPSGVGSLTMASGGGAPVADNNEGADGVGSSSGNWHCDSQWLGDRVITTSTRTWALPTYNNHLYKQISNSTSGGSSNDNAYFGYSTPWGYFDFNRFHCHFSPRDWQRLINNNWGFRPKRLNFKLFNIQVKEVTDNNGVKTIANNLTSTVQVFTDSDYQLPYVLGSAHEGCLPPFPADVFMIPQYGYLTLNDGSQAVGRSSFYCLEYFPSQMLRTGNNFQFSYEFENVPFHSSYAHSQSLDRLMNPLIDQYLYYLSKTINGSGQNQQTLKFSVAGPSNMAVQGRNYIPGPSYRQQRVSTTVTQNNNSEFAWPGASSWALNGRNSLMNPGPAMASHKEGEDRFFPLSGSLIFGKQGTGRDNVDADKVMITNEEEIKTTNPVATESYGQVATNHQSAQAQAQTGWVQNQGILPGMVWQDRDVYLQGPIWAKIPHTDGNFHPSPLMGGFGMKHPPPQILIKNTPVPADPPTAFNKDKLDSFITQYSTGQVSVEIEWELQKENSKRWNPVIQYTSNYYKSNNVEFAVNTEGVYSEPRPIGTRYLTRNL

SEQ ID NO: 740 - protein, 736 aa, Artificial Sequence
  Synthetic polypeptide
MAADGYLPDWLEDNLSEGIREWWDLKPGAPKPKANQQKQDDGRGLVLPGYKYLGPFNGLDKGEPVNAADAAALEHDKAYDQQLKAGDNPYLRYNHADAEFQERLQEDTSFGGNLGRAVFQAKKRVLEPLGLVEEGAKTAPGKKRPVEQSPQEPDSSSGIGKTGQQPAKKRLNFGQTGDSESVPDPQPLGEPPATPAAVGPTTMASGGGAPMADNNEGVDGVGNASGNWHCDSTWLGDRVITTSTRTWALPTYNNHLYKQISSASTGASNDNHYFGYSTPWGYFDFNRFHCHFSPRDWQRLINNNWGFRPKRLNFKLFNIQVKEVTTNDGVTTIANNLTSTVQVFSDSEYQLPYVLGSAHQGCLPPFPADVFMIPQYGYLTLNNGSQAVGRSSFYCLEYFPSQMLRTGNNFTFSYTFEEVPFHSSYAHSQSLDRLMNPLIDQYLYYLNRTQNQSGSAQNKDLLFSRGSPAGMSVQPKNWLPGPCYRQQRVSKTKTDNNNSNFTWTGASKYNLNGRESIINPGTAMASHKDDEDKFFPMSGVMIFGKESAGASNTALDNVMITDEEEIKATNPVATERFGTVAVNFQSSSTDPATGDVHAMGALPGMVWQDRDVYLQGPIWAKIPHTDGHFHPSPLMGGFGLKNPPPQILIKNTPVPANPPAEFSATKLASFITQYSTGQVSVEIEWELQKENSKRWNPEVQYTSNYAKSANVDFTVDNNGLYTEPRPIGTRYLTRPL

SEQ ID NO: 741 - protein, 736 aa, Artificial Sequence
  Synthetic polypeptide
MAADGYLPDWLEDNLSEGIREWWDLKPGAPKPKANQQKQDDGRGLVLPGYKYLGPFNGLDKGEPVNAADAAALEHDKAYDQQLKAGDNPYLRYNHADAEFQERLQEDTSFGGNLGRAVFQAKKRVLEPLGLVEEGAKTAPGKRRPVEQSPQEPDSSSGIGKTGQQPAKKRLNFGQTGDSESVPDPQPLGEPPATPAAVGPTTMASGGGAPMADNNEGADGVGNASGNWHCDSTWLGDRVITTSTRTWALPTYNNHLYKQISSASTGASNDNHYFGYSTPWGYFDFNRFHCHFSPRDWQRLINNNWGFRPKRLNFKLFNIQVKEVTTNDGVTTIANNLTSTVQVFSDSEYQLPYVLGSAHQGCLPPFPADVFMIPQYGYLTLNNGSQAVGRSSFYCLEYFPSQMLRTGNNFTFSYTFEEVPFHSSYAHSQSLDRLMNPLIDQYLYYLNRTQNQSGSAQNKDLLFSRGSPAGMSVQPKNWLPGPCYRQQRVSKTKTDNNNSNFTWTGASKYNLNGRESIINPGTAMASHKDDEDKFFPMSGVMIFGKESAGASNTALDNVMITDEEEIKATNPVATERFGTVAVNFQSSSTDPATGDVHAMGALPGMVWQDRDVYLQGPIWAKIPHTDGHFHPSPLMGGFGLKNPPPQILIKNTPVPANPPAEFSATKFASFITQYSTGQVSVEIEWELQKENSKRWNPEVQYTSNYAKSANVDFTVDNNGLYTEPRPIGTRYLTRPL

SEQ ID NO: 742 - protein, 736 aa, Artificial Sequence
  Synthetic polypeptide
MAADGYLPDWLEDNLSEGIREWWDLKPGAPKPKANQQKQDDGRGLVLPGYKYLGPFNGLDKGEPVNAADAAALEHDKAYDQQLKAGDNPYPRYNHADAEFQERLQEDTSFGGNLGRAVFQAKKRVLEPLGLVGEGAKTAPGKKRPVEQSPQEPDSSSGIGKTGQQPAKKRLNFGQTGDSESVPDPQPLGEPPATPAAVGPTTMASGGGAPMADNNEGADGVGNASGNWHCDSTWLGDRVITTSTRTWALPTYNNHLYKQISSASTGASNDNHYFGYSTPWGYFDFNRFHCHFSPRDWQRLINNNWGFRPKRLNFKLFNIQVKEVTTNDGVTTIANNLTSTVQVFSDSEYQLPYVLGSAHQGCLPPFPADVFMIPQYGYLTLNNGSQAVGRSSFYCLEYFPSQMLRTGNNFTFSYTFEEVPFHSSYAHSQSLDRLMNPPIDQYLYYLNRTQNQSGSAQNKDLLFSRGSPAGMSVQPKNWLPGPCYRQQRVSKTKTDNNNSNFTWTGASKYNLNGRESIINPGTAMASHKDDEDKFFPMSGVMIFGKESAGASNTALDNVMITDEEEIKATNPVATERFGTVAVNFQSSSTDPATGDVHAMGALPGMVWQDRDVYLQGPIWAKIPHTDGHFHPSPLMGGFGLKNPPPQILIKNTPVPANPPAEFSATKFASFITQYSTGQVSVEIEWELQKENSKRWNPEVQYTSNYAKSANVDFTVDNNGLYTEPRPIGTRYLTRPL

SEQ ID NO: 743 - protein, 736 aa, Artificial Sequence
  Synthetic polypeptide
MAADGYLPDWLEDNLSEGIREWWDLKPGAPKPKANQQKQDDGRGLVLPGYKYLGPFNGLDKGEPVNAADAAALEHDKAYDQQLKAGDNPYLRYNHADAEFQERLQEDTSFGGNLGRAVFQAKKRVLEPLGLVEEGAKTAPGKKRPVEQSPQEPDSSSGIGKTGQQPAKKRLNFGQTGDSESVPDPRPLGEPPATPAAVGPTTMASGGGAPMADNNEGADGVGNASGNWHCDSTWLGDRVITTSTRTWALPTYNNHLYKQISSASTGASNDNHYFGYSTPWGYFDFNRFHCHFSPRDWQRLINNNWGFRPKRLNFKLFNIQVKEVTTNDGVTTIANNLTSTVQVFSDSEYQLPYVLGSAHQGCLPPFPADVFMIPQYGYLTLNNGSQAVGRSSFYCLEYFPSQMLRTGNNFTFSYTFEEVPFHSSYAHSQSLDRLMNPLIDQYLYYLNRTQNQSGSAQNKDLLFSRGPPAGMSVQPKNWLPGPCYRQQRVSKTKTDNNNSNFTWTGASKYNLNGRESIINPGTAMASHKDDEDKFFPMSGVMIFGKESAGASNTALDNVMITDEEEIKATNPVATERFGTVAVNFQSSSTDPATGDVHAMGALPGMVWQDRDVYLQGPIWAKIPHTDGHFHPSPLMGGFGLKNPPPQILIKNTPVPANPPAEFSATKFASFITQYSTGQVSVEIEWELQKENSKRWNPEVQYTSNYAKSANVDFTVDNNGLYTEPRPIGTRYLTRPL

SEQ ID NO: 744 - protein, 736 aa, Artificial Sequence
  Synthetic polypeptide
MAADGYLPDWLEDNLSEGIREWWDLKPGAPKPKANQQKQDDGRGLVLPGYKYLGPFNGLDKGEPVNAADAAALEHDKAYDQQLKAGDNPYLRYNHADAEFQERLQEDTSFGGNLGRAVFQAKKRVLEPLGLVEEGAKTAPGKKRPVEQSPQEPDSSSGIGKTGQQPAKKRLNFGQTGGSESVPDPQPLGEPPATPAAVGPTTMASGGGAPMADNNEGADGVGNASGNWHCDSTWLGDRVITTSTRTWALPTYNNHLYKQISSASTGASNDNHYFGYSTPWGYFDFNRFHCHFSPRDWQRLINNNWGFRPKRLNFKLFNIQVKEVTTNDGVTTIANNLTSTVQVFSDSEYQLPYVLGSAHQGCLPPFPADVFMIPQYGYLTLNNGSQAVGRSSFYCLEYFPSQMLRTGNNFTFSYTFEEVPFHSSYAHSQSLDRLMNPPIDQYLYYLNRTQNQSGSAQNKDLLFSRGSPAGMSVQPKNWLPGPCYRQQRVSKTKTDNNNSNFTWTGASKYNLNGRESIINPGTAMASHKDDEDKFFPMSGVMIFGKESAGASNTALDNVMITDEEEIKATNPVATERFGTVAVNFQSSSTDPATGDVHAMGALPGMVWQDRDVYLQGPIWAKIPHTDGHFHPSPLMGGFGLKNPPPQILIKNTPVPANPPAEFSATKFASFITQYSTGQVSVEIEWELQKENSKRWNPEVQYTSNYAKSANVDFTVDNNGLYTEPRPIGTRYLTRPL

SEQ ID NO: 745 - protein, 736 aa, Artificial Sequence
  Synthetic polypeptide
MAADGYLPDWLEDNLSEGIREWWDLKPGAPKPKANQQKQDDGRGLVLPGYKYLGPFNGLDKGEPVNAADAAALEHDKAYDQQLKAGDNPYLRYNHADAEFQERLQEDTSFGGNLGRAVFQAKKRVLEPLGLVEEGAKTAPGKKRPVEQSPQEPDSSSGIGKTGQQPAKKRLNFGQTGDSESVPDPQPLGEPPATPAAVGPTTMASGGGAPMADNNEGADGVGNASGNWHCDSTWLGDRVITTSTRTWALPTYNNHLYKQISSASTGASNDNHYFGYSTPWGYFDFNRFHCHFSPRDWQRLINNNWGFRPKRLNFKLFNIQVKEVTTNDGVTTIANNLTSTVQVFSDSEYQLPYVLGSAHQGCLPPFPADVFMIPQYGYLTLNNGSQAVGRSSFYCLEYFPSQMLRTGNNFTFSYTFEEVPFHSSYAHSQSLDRLMNPLIDQYLYYLNRTQNQSGSAQNKDLLFSRGSPAGMSVQPKNWLPGPCYRQQRVSKTKTDNNNSNFTWTGASKYNLNGRESIINPGTAVASHKDDEDKFFPMSGVMIFGKESAGASNTALDNVMITDEEEIKATNPVATERFGTVAVNFQSSSTDPATGDVHAMGALPGMVWQDRDVYLQGPIWAKIPHTDGHFHPSPLMGGFGLKNPPPQILIKNTPVPANPPAEFSATKFASFITQYSTGQVSVEIEWELQKENSKRWNPEVQYTSNYAKSANVDFTVDNNGLYTEPRPIGTRYLTRPL

SEQ ID NO: 746 - protein, 736 aa, Artificial Sequence
  Synthetic polypeptide
MAADGYLPDWLEDNLSEGIREWWDLKPGAPKPKANQQKQDDGRGLVLPGYKYLGPFNGLDKGEPVNAADAAALEHDKAYDQQLKAGDNPYLRYNHADAEFQERLQEDTSFGGNLGRAVFQAKKRVLEPLGLVEEGAKTAPGKKRPVEQSPQEPDSSSGIGKTGQQPAKKRLNFGQTGDSESVPDPQPLGEPPATPAAVGPTTMASGGGAPMADNNEGADGVGNASGNWHCDSTWLGDRVITTSTRTWALPTYNNHLYKQISSASTGASNDNHYFGYSTPWGYFDFNRFHCHFSPRDWQQLINNNWGFRPKRLNFKLFNIQVKEVTTNDGVTTIANNLTSTVQVFSDSEYQLPYVLGSAHQGCLPPFPADVFMIPQYGYLTLNNGSQAVGRSSFYCLEYFPSQMLRTGNNFTFSYTFEEVPFHSSYAHSQSLDRLMNPLIDQYLYYLNRTQNQSGSAQNKDLLFSRGSPAGMSVQPKNWLPGPCYRQQRVSKTKTDNNNSNFTWTGASKYNLNGRESIINPGTAMASHKDDEDKFFPMSGVMIFGKESAGASNTALDNVMITDEEEIKATNPVATERFGTVAVNFQSTSTDPATGDVHAMGALPGMVWQDRDVYLQGPIWAKIPHTDGHFHPSPLMGGFGLKNPPPQILIKNTPVPANPPAEFSATKFASFITQYSTGQVSVEIEWELQKENSKRWNPEVQYTSNYAKSADVDFTVDNNGLYTEPRPIGTRYLTRPL

SEQ ID NO: 747 - protein, 736 aa, Artificial Sequence
  Synthetic polypeptide
MAADGYLPDWLEDNLSEGIREWWDLKPGAPKPKANQQKQDDGRGLVLPGYKYLGPFNGLDKGEPVNAADAAALEHDKAYDQQLKAGDNPYLRYNHADAEFQERLQEDTSFGGNLGRAVFQAKKRVLEPLGLVEEGAKTAPGKKRPVEQSPQEPDSSSGIGKTGQQPAKKRLNFGQTGDSESVPDPQPLGEPPATPAAVGPTTMASGGGAPMADNNEGADGVGNASGNWHCDSTWLGDRVITTSTRTWALPTYNNHLYKQISSASTGASNDNHYFGYSTPWGYFDFNRFHCHFSPRDWQRLINNNWGFRPKRLNFKLFNIQVKEVTTNDGVTTIANNLTSTVQVFSDSEYQPPYVLGSAHQGCLPPFPADVFMIPQYGHLTLNNGSQAVGRSSFYCLEYFPSQMLRTGNNFTFSYTFEEVPFHSSYAHSQSLDRLTNPLIDQYLYYLNRTQNQSGSAQNKDLLFSRGSPAGMSVQPKNWLPGPCYRQQRVSKTKTDNNNSNFTWTGASKYNLNGRESIINPGTAMASHKDDEDKFFPMSGVMIFGKESAGASNTALDNVMITDEEEIKATNPVATERFGTVAVNFQSSSTDPATGDVHAMGALPGMVWQDRDVYLQGPIWAKIPHTDGHFHPSPLMGGFGLKNPPPQILIKNTPVPANPPAEFSATKFASFITQYSTGQVSVEIEWELQKENSKRWNPEVQYTSNYAKSANVDFTVDNNGLYTEPRPIGTRYLTRPL

SEQ ID NO: 748 - protein, 736 aa, Artificial Sequence
  Synthetic polypeptide
MAADGYLPDWLEDNLSEGIREWWDLKPGAPKPKANQQEQDDGRGLVLPGYKYLGPFNGLDKGEPVNAADAAALEHDKAYDQQLKAGDNPYLRYNHADAEFQERLQEDTSFGGNLGRAVFQAKKRVLEPLGLVEEGAKTAPGKKRPVEQSPQEPDSSSGIGKTGQQPAKKRLNFGQTGDSESVPDPQPLGEPPATPAAVGPTTMASGGGAPMADNNEGADGVGNASGNWHCDSTWLGDRVITTSTRTWALPTYNNHLYKQISSASTGASNDNHYFGYSTPWGYFDFNRFHCHFSPRDWQRLINNNWGFRPKRLNFKLFNIQVKEVTTNDGVTTIANNLTSTVQVFSDSEYQLPYVLGSAHQGCLPPFPADVFMIPQYGYLTLNNGSQAVGRSSFYCLEYFPSQMLRTGNNFTFSYTFEEVPFHSSYAHSQSLDRLMNPLIDQYLYYLNRTQNQSGSAQNKDLLFSRGSPAGMSVQPKNWLPGPCYRQQRVSKTKTDNNNSNFTWTGASKYNLNGRESIINPGTAMASHKDDEDKFFPMSGVMIFGKESAGASNTALDNVMITDEEEIKATNPVATERFGTVAVNFQSSSTDPATGDVHATGTLPGMVWQDRDVYLQGPIWAKIPHTDGHFHPSPLMGGFGLKNPPPQILIKTTPVPANPPAEFSATKFASFITQYSTGQVSVEIEWELQKENSKRWNPEVQYTSNYAKSANVDFTVDDNGLYTEPRPIGTRYLTRPL

SEQ ID NO: 749 - protein, 736 aa, Artificial Sequence
  Synthetic polypeptide
MAADGYLPDWLEDNLSEGIREWWDLKPGAPKPKANQQKQDDGRGLVLPGYKYLGPFNGLDKGEPVNAADAAALEHDKAYDQQLKAGDNPYLRYNHADAEFQERLQEDTSFGGNLGRAVFQAKKRVLEPLGLVEEGAKTAPGKKRPVEQSLQEPDSSSGIGKTGQQPAKKRLNFGQTGDSESVPDPQPLGEPPATPAAVGPTTMASGGGAPMADNNEGADGVGNASGNWHCDSTWLGDRVITTSTRTWALPTYNNHLYKQISSASTGASNDNHYFGYSTPWGYFDFNRFHCHFSPRDWQRLINNNWGFRPKRLNFKLFNIQVKEVTTNDGVTTIANNLTSTVQVFSDSEYQLPYVLGSAHQGCLPPFPADVFMIPQYGYLTLNNGSQAVGRSSFYCLEYFPSQMLRTGNNFTFSYTFEEVPFHSSYAHSQSLDRLMNPLIDQYLYYLNRTQNQSGSAQNKDLLFSRGSPAGMSVQPKNWLPGPCYRQQRVSKTKTDNDNSNFTWTGASKYNLNGRESIINPGTAMASHKDDEDKFFPMSGVMIFGKESAGASNTALDNVMITDEEEIKATNPVATERFGTVAVNFQSSSTDPATGDVHAMGALPGMVWQDRDVYLQGPIWAKIPHTDGHFHPSPLMGGFGLKNPPPQILIKNTPVPANPPAEFSATKFASFITQYSTGQVSVEIEWELQKENSKRWNPEVQYTSNYAKSANVDFTVDNNGLYTEPRPIGTRYLTRPL

SEQ ID NO: 750 - protein, 736 aa, Artificial Sequence
  Synthetic polypeptide
MAADGYLPDWLEDNLSEGIREWWDLKPGAPKPKANQQKQDDGRGLVLPGYKYLGPFNGLDKGEPVNAADAAALEHDKAYDQQLKAGDNPYLRYNHADAEFQERLQEDTSFGGNLGRAVFQAKKRVLEPLGLVEEGAKTAPGKKRPVEQSPQEPDSSSGIGKTGQQPAKKRLNFGQTGDSESVPDPQPLGEPPATPAAVGPTTMASGGGAPMADNNEGADGVGNASGNWHCDSTWLGDRVITTSTRTWALPTYNNHLYKQISSASTGASNDNHYFGYSTPWGYFDFNRFHCHFSPRDWQRLINNNWGFRPKRLNFKLFNIQVKEVTTNDGVTTIANNLTSTVQVFSDSEYQLPYVLGSAHQGCLPPFPADVFMIPQYGYLTLNNGSQAVGRSSFYCLEYFPSQMLRTGNNFTFSYTFEEAPFHSSYAHSQSLDRLMNPLIDQYLYYLNRTQNQSGSAQNKDLLFSRGSPAGMSVQPKNWLPGPCYRQQRVSKTKTDNNNSNFTWTGASKYNLNGRESIINPGTAMASHKDDEDKFFPMSGVMIFGKESAGASNTALDNVMITDEEEIKATNPVATERFGTVAVNFQSSSTDPATGDVHAMGALPGMVWQDRDVYLQGPIWAKIPHTDGHFHPSPLMGGFGLKNPPPQILIKNTPVPANPPAEFSATKFASFITQYSTGQVSVEIEWELQKENSKRWNPEVQYTSNYAKSANVDFTVDNNGLYTEPRPVGTRYLTRPL

SEQ ID NO: 751 - protein, 736 aa, Artificial Sequence
  Synthetic polypeptide
MAADGYLPDWLEDNLSEGIREWWDLKPGAPKPKANQQKQDDGRGLVLPGYKYLGPFNGLDKGEPVNAADAAALEHDKAYDQQLKAGDNPYLRYNHADAEFQERLQENTSFGGNLGRAVFQAKKRVLEPLGLVEEGAKTAPGKKRPVEQSPQEPDSSSGIGKTGQQPAKKRLNFGQTGDSESVPDPQPLGEPPATPAAVGPTTMASGGGAPMADNNEGADGVGNASGNWHCDSTWLGDRVITTSTRTWALPTYNNHLYKQISSASTGASNDNHYFGYSTPWGYFDFNRFHCHFPPRDWQRLINNNWGFRPKRLNFKLFNIQVKEVTSNDGVTTIANNLTSTVQVFSDSEYQLPYVLGSAHQGCLPPFPADVFMIPQYGYLTLNNGSQAVGRSSFYCLEYFPSQMLRTGNNFTFSYTFEEVPFHSSYAHSQSLDRLMNPLIDQYLYYLNRTQNQSGSAQNKDLLFSRGSPAGMSVQPKNWLPGPCYRQQRVSKTKTDNNNSNFTWTGASKYNLNGRESIINPGTAMASHKDDEDKFFPMSGVMIFGKESAGASNTALDNVMITDEEEIKATNPVATERFGTVAVNFQSSSTDPATGDVHAMGALPGMVWQDRDVYLQGPIWAKIPHTDGHFHPSPLMGGFGLKNPPPQILIKNTPVPANPPAEFSATKFASFITQYSTGQVSVEIEWELQKENSKRWNPEVQYTSNYAKSANVDFTVDNNGLYTEPRPIGTRYLTRPL

SEQ ID NO: 752 - protein, 736 aa, Artificial Sequence
  Synthetic polypeptide
MAADGYLPDWLEDNLSEGIREWWDLKPGAPKPKANQQKQDDGRGLVLPGYKYLGPFNGLDKGEPVNAADAAALEHDKAYDQQLKAGDNPYLRYNHADAEFQERLQEDTSFGGNLGRAVFQAKKRVLEPLGLVEEGAKTAPGKKRPVEQSPQEPDSSSGIGKTGQQPAKKRLNFGQTGDSESVPDPQPLGEPPATPAAVGPTTMASGGGAPMADNNEGADGVGNASGNWHCDSTWLGDRVITTSTRTWALPTYNNHLYKQISSASTGASNDNHYFGYSTPWGYFDFNRFHCHFSPRDWQRLINNNWGFRPKRLNFKLFNIQVKEVTTNDGVTTIANNLTSTVQVFSDSEYQLPYVLGSAHQGCLPPFPADVFMIPQYGYLTLNNGSQAVGRSSFYCLEYFPSQMLRTGNNFTFSYTFEEVPFHSSYAHSQSLDRLMNPLIDQYLYYLNRTQNQSGSAQNKDLLFSRGSPAGTSVQPKNWLPGPCYRQQRVSKTKTDNNNSNFTWTGASKYNLNGRESIINPGTAMASHKDDEDKFFPMSGVMIFGKESAGASNTALDNVMITDEEEIKATNPVATERFGTVAVNFQSSSTDPATGDVHAMGALPGMVWQDRDVYLQGPIWAKIPHTDGHFHPSPLMGGFGLKNPPPQILIKNTPVPANPPAEFSATKFASFITQYSTGQVSVEIEWELQKENSKRWNPEVQYTSNYAKSANVDFTVDNNGLYTGPRPIGTRYLTRPL

SEQ ID NO: 753 - protein, 736 aa, Artificial Sequence
  Synthetic polypeptide
MAADGYLPDWLEDNLSEGIREWWDLKPGAPKPKANQQKQDDGRGLVLPGYKYLGPFNGLDKGEPVNAADAAALEHDKAYDQQLKAGDNPYLRYNHADAEFQERLQEDTSFGGNLGRAVFQAKKRVLEPLGLVEEGAKTAPGKKRPVEQSPQEPDSSSGIGKTGQQPAKKRLNFGQTGDSESVPDPQPLGEPPATPAAVGPTTMASGGGAPMADNNEGADGVGNAPGNWHCDSTWLGDRVITTSTRTWALPTYNNHLYKQISSASTGASNDNHYFGYSTPWGYFDFNRFHCHFSPRDWQRLINNNWGFRPKRLNFKLFNIQVKEVTTNDGVTTIANNLTSTVQVFSDSEYQLPYVLGSAHQGCLPPFPADVFMIPQYGYLTLNNGSQAVGRSSFYCLEYFPSQMLRTGNNFTFSYTFEEVPFHSSYAHSQSLDRLMNPLIDQYLYYLNRTQNQSGSAQNKDLLFSRGSPAGMSVQPKNWLPGPCYRQQRVSKTKTDNNNSNFTWTGASKYNLNGRESIINPGTAMASHKDDEDKFFPMSGVMIFGKESAGASNTALDNVMITGEEEIKATNPVATERFGTVAVNFQSSSTDPATGDVHAMGALPGMVWQDRDVYLQGPIWAKIPHTDGHFHPSPLMGGFGLKNPPPQILIKNTPVPANPPAEFSATKFASFITQYSTGQVSVEIEWELQKENSKRWNPEVQYTSNYAKSANVDFTVDNNGLYTEPRPIGTRYLTRPL

SEQ ID NO: 754 - protein, 736 aa, Artificial Sequence
  Synthetic polypeptide
MAADGYLPDWLEDNLSEGIREWWDLKPGAPKPKANQQKQDDGRGLVLPGYKYLGPFNRLDKGEPVNAADAAALEHDKAYDQQLKAGDNPYLRYNHADAEFQERLQEDTSFGGNLGRAVFQAKKRVLEPLGLVEEGAKTAPGRKRPVEQSPQEPDSSSGIGKTGQQPAKKRLNFGQTGDSESVPDPQPLGEPPATPAAVGPTTMASGGGAPMADNNEGADGVGNASGNWHCDSTWLGDRVITTSTRTWALPTYNNHLYKQISSASTGASNDNHYFGYSTPWGYFDFNRFHCHFSPRDWQRLINNNWGFRPKRLNFKLFNIQVKEVTTNDGVTTIANNLTSTVQVFSDSEYQLPYVLGSAHQGCLPPFPADVFMIPQYGYLTLNNGGQAVGRSSFYCLEYFPSQMLRTGNNFTFSYTFEEVPFHSSYAHSQSLDRLMNPLIDQYLYYLNRTQNQSGSAQNKDLLFSRGSPAGMSVQPKNWLPGPCYRQQRVSKTKTDNNNSNFTWTGASKYSLNGRESIINPGTAMASHKDDEDKFFPMGGVMIFGKESAGASNTALDNAMITDEEEIKATNPVATERFGTVAVNFQSSSTDPATGDVHAMGALPGMVWQDRDVYLQGPIWAKIPHTDGHFHPSPLMGGFGLKNPPPQILIKNTPVPANPPAEFSATKFASFITQYSTGQVSVEIEWELQKENSKRWNPEVQYTSNYAKSANVDFTVDNNGLYTEPRPIGTRYLTRPL

SEQ ID NO: 755 - protein, 736 aa, Artificial Sequence
  Synthetic polypeptide
MAADGYLPDWLEDNLSEGIREWWDLKPGAPKPKANQQKQDDGRGLVLPGYKYLGPFNGLDKGEPVNAADAAALEHDKAYDQQLKAGDNPYLRYNHADAEFQERLQEDTSFGGNLGRAVFQAKKRVLEPLGLVEEGAKTAPGKKRPVEQSPQEPDSSSGIGKTGQQPAKKRLNFGQTGDSESVPDPQPLGEPPATPAAVGPTTMASGGGAPMADNNEGADGVGNASGNWHCDSTWLGGRVITTSTRTWALPTYNNHLYKQISSASTGASNDNHYFGYSTPWGYFDFNRFHCHFSPRDWQRLINNNWGFRPKRLNFKLFNIQVKEVTTNDGVTTIANNLTSTVQVFSDSEYQLPYVLGSAHQGCLPPFPADVFMIPQYGYLTLNNGSQAVGRSSFYCLEYFPSQMLRTGNNSTFSYTFEEVPFHSSYAHSQSLDRLMNPLIDQYLYYLNRTQNQSGSAQNKDLLFSRGSPAGMSVQPKNWLPGPCYRQQRVSKTKTDNNNSNFTWTGASKYNLNGRESIINPGTAMASHKDDEDKFFPMSGVMIFGKESAGASNTALDNVMITDEEEIKATNPVATERFGTVAVNFQSSSTDPATGDVHAMGTLPGMVWQDRDVYLQGPIWAKIPHTDGHFHPSPLMGGFGLKNPPPQILIKNTPVPANPPAEFSATKFASFITQYSTGQVSVEIEWELQKENSKRWNPEVQYTSNYAKSANVDFTVDNNGLYTEPRPIGTRYLTRPL

SEQ ID NO: 756 - protein, 736 aa, Artificial Sequence
  Synthetic polypeptide
MAADGYLPDWLEDNLSEGIREWWDLKPGAPKPKANQQKQDDGRGLVLPGYKYLGPFNGLDKGEPVSAADAAALEHDKAYDQQLKAGDNPYLRYNHADAEFQERLQEDTSFGGNLGRAVFQAKKRVLEPLGLVEEGAKTAPGKKRPVEQSPQEPDSSSGIGKTGQQPAKERLNFGQTGDSESVPDPQPLGEPPATPAAVGPTTMASGGGAPMADNNEGADGVGNASGNWHCDSTWLGDRVITTSTRTWALPTYNNHLYKQISSASTGASNDNHYFGYSTPWGYFDFNRFHCHFSPRDWQRLINNNWGFRPKRLNFKLFNIQVKEVTTNDGVTTIANNLTSTVQVFSDSEYQLPYVLGSAHQGCLPPFPADVFMIPQYGYLTLNNGSQAVGRSSFYCLEYFPSQMLRTGNNFTFSYTFEEVPFHSSYAHSQSLDRLMNPLIDQYLYYLNRTQNQSGSAQNKDLLFSRGSPAGMSVQPKNWLPGPCYRQQRVSKTKTDNNNSNFTWTGASKYNLNGRESIINPGTAMASHKDDEDKFFPMSGVMIFGKESAGASNTALDNVMITDEEEIKATNPVATERFGTVAVNFQSSSTDPATGDVHAMGALPGMVWQDRDVYLQGPIWAKIPHTDGHFHPSPLMGGFGLKNPPPQILIKNTPVPANPPAEFSATKFASFITQYSTGQVSVEIEWELQKENSKRWNPEVQYTSNYAKSANVDFTVDNNGLYTEPRPIGTRYLTRPL

SEQ ID NO: 757 - protein, 736 aa, Artificial Sequence
  Synthetic polypeptide
MAADGYLPDWLEDNLSEGIREWWDLKPGAPKPKANQQKQDDGRGLVLPGYKYLGPFNGLDKGEPVNAADAAALEHDKAYDQQLKAGDNPYLRYNHADAEFQERLQEDTSFGGNLGRAVFQAKKRVLEPLGLVEEGAKTAPGKKRPVEQSPQEPDSSSGIGKTGQQPAKKRLNFGQTGDSESVPDPQPLGEPPATPAAVGPTTMASGGGAPMADNNEGADGVGNASGNWHCDSTWLGDRVITTSTRTWALPTYNNHLYKQISSASTGASNDNHYFGYSTPWGYFDFNRFHCHFSPRDWQRLINNNWGFRPKRLNFKLFNIQVKEVTTNDGVTTIANNLTSTVQVFSDSEYQLPYVLGSAHQGCLPPFPADVFMIPQYGYLTLNNGSQAVGRSSFYCLEYFPSQMLRTGNNFTFSYTFEEVPFHSSYAHSQSLDRLMNPLIDQYLYYLNRTQNQSGSAQNKDLLFSRGSPAGMSVQPKNWLPGPCYRQQRVSKTKTDNNNSNFTWTGASKYNLNGRESIINPGTAMASHKDDEDKFFPMSGVMIFGKESAGASNTALDNVMITDEGEIKATNPVATERFGTVAVNFQSSSTDPATGDVHAMGALPGMVWQDRDVYLQGPIWAKIPHTDGHFHPSPLMGGFGLKNPPPQILIKNTPVPANPPAEFSATKFASFITQYSTGQVSVEIEWELQKENSKRWNPEVQYTSNYAKSANVDFTVDNNGLYTEPRPIGTRYLTRPL

SEQ ID NO: 758 - protein, 736 aa, Artificial Sequence
  Synthetic polypeptide
MAADGYLPDWLEDNLSEGIREWWDLKPGAPKPKANQQKQDDGRGLVLPGYKYLGPFNGLDKGEPVNAADAAALEHDKAYDQQLKAGDNPYLRYNHADAEFQERLQEDTSFGGNLGRAVFQAKKRVLEPFGLVEEGAKTAPGKKRPVEQSPQEPDSSSGIGKTGQQPAKKRLNFGQTGDSESVPDPQPLGEPPATPAAVGPTTMASGGGAPMADNNEGADGVGNASGNWHCDSTWLGDRVITTSTRTWALPTYNNHLYKQISSASTGASNDNHYFGYSTPWGYFDFNRFHCHFSPRDWQRLINNNWGFRPKRLNFKLFNIQVKEVTTNDGVTTIANNLTSTVQVFSDSEYQLPYVLGSAHQGCLPPFPADVFMIPQYGYLTLNNGSQAVGRSSFYCPEYFPSQMLRTGNNFTFSYTFEEVPFHSSYAHSQSLDRLMNPLIDQYLYYLNRTQNQSGSAQNKDLLFSRGSPAGMSVQPKNWLPGPCYRQQRVSKTKTDNNNSNFTWTGASKYNLNGRESIINPGTAMASHKDDKDKFFPMSGVMIFGKESAGASNTALDNVMITDEEEIKATNPVATERFGTVAVNFQSSNTDPATGDVHVMGALPGMVWQDRDVYLQGPIWAKIPHTDGHFHPSPLMGGFGLKHPPPQILIKNTPVPANPPAEFSATKFASFITQYSTGQVSVEIEWELQKENSKRWNPEVQYTSNYAKSANVDFTVDNNGLYTEPRPIGTRYLTRPL

SEQ ID NO: 759 - protein, 736 aa, Artificial Sequence
  Synthetic polypeptide
MAADGYLPDWLEDNLSEGIREWWDLKPGAPKPKANQQKQDDGRGLVLPGYKYLGPFNGLDKGEPVNAADAAALEHDKAYDQQLKAGDNPYLRYNHADAEFQERLQEDTSFGGNLGRAVFQAKKRVLEPFGLVEEGAKTAPGKKRPVEQSPQEPDSSSGIGKTGQQPAKKRLNFGQTGDSESVPDPQPLGEPPATPAAVGPTTMASGGGAPMADNNEGADGVGNASGNWHCDSTWLGDRVITTSTRTWALPTYNNHLYKQISSASTGASNDNHYFGYSTPWGYFDFNRFHCHFSPRDWQRLINNNWGFRPKRLNFKLFNIQVKEVTTNDGVTTIANNLTSTVQVFSDSEYQLPYVLGSAHQGCLPPFPADVFMIPQYGYLTLNNGSQAVGRSSFYCLEYFPSQMLRTGNNFTFSYTFEEVPFHSSYAHSQSLDRLMNPLIDQYLYYLNRTQNQSGSAQNKDLLFSRGSPAGMSVQPKNWLPGPCYRQQRVSKTKTDNNNSNFTWTGASKYNLNGRESIINPGTAMASHKDDKDKFFPMSGVMIFGKESAGASNTALDNVMITDEEEIKATNPVATERFGTVAVNFQSSDTDPATGDVHVMGALPGMVWQDRDVYLQGPIWAKIPHTDGHFHPSPLMGGFGLKHPPPQILIKNTPVPANPPAEFSATKFASFITQYSTGQVSVEIEWELQKENSKRWNPEVQYTSNYAKSANVDFTVDNNGLYTEPRPIGTRYLTRPL

SEQ ID NO: 760 - protein, 736 aa, Artificial Sequence
  Synthetic polypeptide
MAADGYLPDWLEDNLSEGIREWWDLKPGAPKPKANQQKQGDGRGLVLPGYKYLGPFNGLDKGEPVNAADAAALEHDKAYDQQLKAGDNPYLRYNHADAEFQERLQEDTSFGGNLGRAVFQAKKRVLEPFGLVEEGAKTAPGKKRPVEQSPQEPDSSSGIGKTGQQPAKKRLNFGQTGDSESVPDPQPLGEPPATPAAVGPTTMASGGGAPMADNNEGADGVGNASGNWHCDSTWLGDRVITTNTRTWALPTYNNHLYKQISSASTGASNDNHYFGYSTPWGYFDFNRFHCHFSPRDWQRLINNNWGFRPKRLNFKLFNIQVKEVTTNDGVTTIANNLTSTVQVFSDSEYQLPYVLGSAHQGCLPPFPADVFMIPQYGYLTLNNGSQAVGRSSFYCLEYFPSQMLRTGNNFTFSYTFEEVPFHSSYGHSQSLDRLMNLLIDQYLYYLNRTQNQSGSAQNKDLLFSRGSPAGMFVQPKNWLPGPCYRQQRVSKTKTDNNNSNFTWTGASKYNLNGRESIINPGTAMASHKDDEDKFFPMSGVMIFGKESAGASNTALDNVMITDEEEIKATNPVATERFGTVAVNFQSSSTDPATGDVHVMGALPGMVWQDRDVYLQGPIWAKIPHTDGHFHPSPLMGGFGLKHPPPQILIKNTPVPANPPAEFSATKFASFITQYSTGQVSVEIEWELQKENSKRWNPEVQYTSNYAKSANVDFTVDNNGLYTEPRPIGTRYLTRPL

SEQ ID NO: 761 - protein, 736 aa, Artificial Sequence
  Synthetic polypeptide
MAADGYLPDWLEDNLSEGIREWWDLKPGAPKPKANQQKQDDGRGLVLPGYKYLGPFNGLDKGEPVNAADAAALEHDKAYDQQLKAGDNPYLRYNHADAEFQERLQEDTSFGGNLGRAVFQAKKRVLEPFGLVEEGAKTAPGKKRPVEQSPQEPDSSSGIGKTGQQPAKKRLNFGQTGDSESVPDPQPLGEPPATPAAVGPTTMASGGGAPMADNNEGADGVGNASGNWHCDSTWLGDRVITTNTRTWALPTYNNHLYKQISSASTGASNDNHYFGYSTPWGYFDFNRFHCHFSPRDWQRLINNNWGFRPKRLNFKLFNIQVKEVTTNDGVTTIANNLTSTVQVFSDSEYQLPYVLGSAHQGCLPPFPADVFMIPQYGYLMLNNGSQAVGRSSFYCLEYFPSQMLRTGNNFTFSYTFEEVPFHSSYAHSQSLDRLMNPLIDQYLYYLNRTQNQSGSAQNKDLLFSRGSPAGMSVQPKNWLPGPCYRQQRVSKTKTDNNNSNFTWTGASKYNLNGRESIINPGTAMASHKDDEDKFFPMSGVMIFGKESAGASNTALDNVMITDEEEIKATNPAATERFGTVAVNFQSSSTDPATGDVHVMGALPGMVWQDRDVYLQGPIWAKIPHTDGHFHPSPLMGGFGLKHPPPQILIKNTPVPANPPAEFSATKFASFITQYSTGQVSVEIEWELQKENSKRWNPEVQYTSNYAKSANVDFTVDNNGLYTEPRPIGTRYLTRPL

SEQ ID NO: 762 - protein, 736 aa, Artificial Sequence
  Synthetic polypeptide
MAADGYLPDWLEDNLSEGIREWWDLKPGAPKPKANQQKQDDGRGLVLPGYKYLGPFNGLDKGEPVNAADAAALEHDKAYDQQLKAGDNPYLRYNHADAEFQERLQEDTSFGGNLGRAVFQAKKRVLEPFGLVEEGAKTAPGKKRPVEQSPQEPDSSSGIGKTGQQPAKKRLNFGQTGDSESVPDPQPLGEPPATPAAVGPTTMASGGGAPMADNNEGADGVGNASGNWHCDSTWLGDRVITTSTRTWALPTYNNHLYKQISSASTGASNDNHYFGYSTPWGYFDFNRFHCHFSPRDWQRLINNNWGFRPKRLNFKLFNIQVKEVTTNDGVTTIANNLTSTVQVFSDSEYQLPYVLGSAHQGCLPPFPADVFMIPQYGYLTLNNGSQAVGRSSFYCLEYFPSQMLRTGNNFTFSYTFEEVPFHSSYAHSQSLDRLMNPLIDQYLYYLNRTQNQSGSAQNKDLLFSRGSPAGMSVQPKNWLPGPCYRQQRVSKTKTDNNNSNFTWTGASKYNLNGRESIINPGTAMASHKDDEDKFFPMSGVMIFGKESAGASNTALDNVMITDEEEIKATNPVATERFGTVAVNFQSSSTDPATGDVHVMGALPGMVWQDRDVYLQGPIWAKIPHTDGHFHPSPLMGGFGLKHPPPQILIKNTPVPANPPAEFSATKFASFITQYSTGQVSVEIEWELQKENSKRWNPEVQYTSNYAKSANVDFTVDNNGLYTEPRPIGTRYLTRPL

SEQ ID NO: 763 - protein, 736 aa, Artificial Sequence
  Synthetic polypeptide
  MOD_RES (102)..(102): Any naturally occurring amino acid
MAADGYLPDWLEDNLSEGIREWWDLKPGAPKPKANQQKQDDGRGLVLPGYKYLGPFNGLDKGEPVNAADAAALEHDKAYDQQLKAGDNPYLRYNHADAEFQXRLQEDTSFGGNLGRAVFQAKKRVLEPFGLVEEGAKTAPGKKRPVEQSPQEPDSSSGIGKTGQQPAKKRLNFGQTGDSESVPDPQPLGEPPATPAAVGPTTMASGGGAPMADNNEGADGVGNASGNWHCDSTWLGGRVITTSTRTWALPTYNNHLYKQISSASTGASNDNHYFGHSTPWGYFDFNRFHCHFSPRDWQRLINNNWGFRPKRLNFKLFNIQVKEVTTNDGVTTIANNLTSTVQVFSDSEYQLPYVLGSAHQGCLPPSPADVFMIPQYGYLTLNNGSQAVGRSSFYCLEYFPSQMLRTGNNFTFSYTFEEVPFHSSYAHSQSLDRLMNPLIDQYLYYLNRTQNQSGSAQNKDLLFSRGSPAGMSVQPKNWLPGPCYRQQRVSKTKTDNNNSNFTWTGASKYNLNGRESIINPGTAMASHKDDKDKFFPMSGVMIFGKESAGASNTALDNVMITDEEEIKATNPVATERFGTVAVNFQSSNTDPATGDVHVMGALPGMVWQDRDVYLQGPIWAKIPHTDGHFHPSPLMGGFGLKHPPPQILIKNTPVPANPPAEFSATKFASFITQYSTGQVSVEIEWELQKENSKRWNPEVQYTSNYAKSANVDFTVDNNGLYTEPRPIGTRYLTRPL

SEQ ID NO: 764 - protein, 736 aa, Artificial Sequence
  Synthetic polypeptide
MAADGYFPDWLEDNLSEGIREWWDLKPGAPKPKANQQKQDDGRGLVLPGYKYLGPFNGLDKGEPVNAADAAALEHDKAYDQQLKAGDNPYLRYNHADAEFQERLQEDTSFGGNLGRAVFQAKKRVLEPFGLVEEGAKTAPGKKRPVEQSPQEPDSSSGIGRTGQQPAKKRLNFGQTGDSESVPDPQPLGEPPATPAAVGPTTMASGGGAPMADNNEGADGVGNASGNWHCDSTWLGDRVITTSTRTWALPTYNNHLYKQISSASTGASNDNHYFGYSTPWGYFDFNRFHCHFSPRDWQRLINNNWGFRPKRLNFKLFNIQVKEVTTNDGVTTIANNLTSTVQVFSDSEYQLPYVLGSAHQGCLPPFPADVFMIPQYGYLTLNNGSQAVGRSSFYCLEYFPSQMLRTGNNFTFSYTFEEVPFHSSYAHSQSLDRLMNPLIDQYLYYLNRTQNQSGSAQNKDLLFSRGSPAGMSVQPKNWLPGPCYRQQRVSKTKTDNNNSNFTWTGASKYNLNGRESIINPGTAMASHKDDEDKFFPMSGVMIFGKESAGASNTALDNVMITDEEEIKATNPVATERFGTVAVNFQSSSPDPATGDVHVMGALPGMVWQDRDVYLQGPIWAKIPHTDGHFHPSPLMGGFGLKHPPPQILIKNTPVPANPPAEFSATKFASFITQYSTGQVSVEIEWELQKENSKRWNPEVQYTSNYAKSANVDFTVDNNGLYSEPRPIGTRYLTRPL

SEQ ID NO: 765 - protein, 736 aa, Artificial Sequence
  Synthetic polypeptide
MAADGYLPDWLEDNLSEGIREWWDLKPGAPKPKANQQKQDDGRGLVLPGYKYLGPFNGLDKGEPVNAADAAALEHDKAYDQQLKAGDNPYLRYNHADAEFQERLQEDTSFGGNLGRAVFQAKKRVLEPFGLVEEGAKTAPGKKRPVEQSPQEPDSSSGIGKTGQQPAKKRLNFGQTGDSESVPDPQPLGEPPATPAAVGPTTMASGGGAPMADNNEGADGVGNASGNWHCDSTWLGDRVITTSTRTWALPTYNNHLYKQTSSASTGASNDNHYFGYSTPWGYFDFNRFHCHFSPRDWQRLINNNWGFRPKRLNFKLFNIQVKEVTTNDGVTTIANNLTSTVQVFSDSEYQLPYVLGSAHQGCLPPFPADVFMIPQYGYLTLNNGSQAVGRSSFYCLEYFPSQMLRTGNNFTFSYTFEEVPFHSSYAHSQSLDRLMNPLIDQYLYYLNRTQNQSGSAQNKDLLFSRGSPAGMSVQPKNWLPGPCYRQQRVSKTKTDYNNSNFTWTGASKYNLNGRESIINPGTAMASHKDDEDKFFPMSGVMIFGKESAGASNTALDNVMITDEEEIKATNPVATERFGTVAVNFQSSSTDPATGDVHVMGALPGMVWQDRDVYLQGPIWAKIPHTDGHFHPSPLMGGFGLKHPPPQILIKNTPVPANPPAEFSATKFASFITQYSTGQVSVEIEWELQKENSKRWNPEVQYTSNYAKSANVDFTVDNNGLYTEPRPIGTRYLTRPL

SEQ ID NO: 766 - protein, 736 aa, Artificial Sequence
  Synthetic polypeptide
MAADGYPPDWLEDNLSEGIREWWDLKPGVPKPKANQQKQDDGRGLVLPGYKYLGPFNGLDKGEPVNAADAAALEHDKAYDQQLKAGDNPYLRYNHADAEFQERLQEDTSFGGNLGRAVFQAKKRVLEPFGLVEEGAKTAPGKKRPVEQSPQEPDSSSGIGKTGQQPAKKRLNFGQTGDSESVPDPQPLGEPPATPAAVGPTTMASGGGAPMADNNEGADGVGNASGNWHCDSTWLGDRVITTSTRTWALPTYNNHLYKQISSASTGASNDNHYFGYSTPWGYFDFNRFHCHFSPRDWQRLINNNWGFRPKRLNFKLFNIQVKEVTTNDGVTTIANNLTSTVQVFSDSEYQLPYVLGSAHQGCLPPFPADVFMIPQYGYLTLNNGSQAVGRSSFYCLEYFPSQMLRTGNNFTFSYTFEEVPFHSSYAHSQSLDRLMNPLIDQYLYYLNRTQNQSGSAQNKDLLFSRGSPAGMSVQPKNWLPGPCYRQQRVSKTKTDNNNSNFTWTGASKYNLNGRESIINPGTAMASHKDDEDKFFPMSGVMIFGKESAGASNTALDNVMITDEEEIKATNPVATERFGTVAVNFQSSSTDPATGDVHVMGALPGMVWQDRDVYLQGPIWAKIPHTDGHFHPSPLMGGFGLKHPPPQILIKNTPVPANPPAEFSATKFASFITQYSTGQVSVEIEWELQKENSKRWNPEVQYTSNYAKSANVDFTVDNNGLYTEPRPIGTRYLTRPL

SEQ ID NO: 767 - protein, 732 aa, Artificial Sequence
  Synthetic polypeptide
MAADGYLPDWLEDNLSEGIREWWDLKPGAPKPKANQQKQDDGRGLVLPGYKYLGPFNGLDKGEPVNAADAAALEHDKAYDQQLKAGDNPYLRYNHADAEFQERLQEDTSFGGNLGRAVFQAKKRVLEPFGLVEEGAKTAPGKKRPVEQSPQEPDSSSGIGKTGQQPAKKRLNFGQTGDSESVPDPQPLGEPPATPAAVGPTTMASGGGAPMADNNEGADGVGNASGNWHCDSTWLGDRVITTSTRTWALPTYNNHLYKQISSASTGASNDNHYFGYSTPWGYFDFNRFHCHFSPRDWQRLINNNWGFRPKRLNFKLFNIQVKEVTTNDGVTTIANNLTSTVQAFSDSEYQLPYVLGSAHQGCLPPFPADVFMIPQYGYLTLNNGSQAVGRSSFYCLEYFPSQMLRTGNNFTFSYTFEEVPFHSSYAHSQSLDRLMNPLIDPYLYYLNRTQNQSGSAQNKDLLFSRGSPAGMSVQPKNWLPGPCYRQQRVSKTKTDNNNSNFTWTGASKYNLNGRESIINPGTAMASHKDDEDKFFPMSGVMIFGKESAGASNTALDNVMITDEEEIKATNPVATERFGTVAVNFQSSSTDPATGDVHVMGALPGMVWQDRDVYLQGPIWAKIPHTDGHFHPSPLMGGFGLKHPPPQILIKNTPVPANPPAEFSATKFASFITQYSTGQVSVEIEWELQKENSKRWNPEVQYTSNYAKSANVDFTVDNNGLYTEPRPIGTRYL

SEQ ID NO: 768 - protein, 736 aa, Artificial Sequence
  Synthetic polypeptide
MAADGYLPDWLEDNLSEGIREWWDLKPGAPKPKANQQKQDDGRGLVLPGYKYLGPFNGLDKGEPVNAADAAALEHDKAYDQQLKAGDNPYLRYNHADAEFQERLQEDTSFGGNLGRAVFQAKKRVLEPFGLVEEGAKTAPGKKRPVEQSPQEPDSSSGIGKTGQQPAKKRLNFGQTGDSESVPDPQPLGEPPATPAAVGPTTMASGGGAPMADNNEGADGVGNASGNWHCDSTWLGDRVITTSTRTWALPTYNNHLYKQISSASTGASNDNHYFGYSTPWGYFDFNRFHCHFSPRDWQRLINNNWGFRPKRLNFKLFNIQVKEVTTNDGVTTIANNLTSTVQVFSDSEYQLPYVLGSAHQGCLPPFPADVFMIPQYGYLTLNNGSQAVGRSSFYCLEYFPSQMLRTGNNFTFSYTFEEVPFHSSYAHSQSLDRLMNPLIDQYLYYLNRTQNQSGSAQNKDLLFSRGSPAGMSVQPKNWLPGPCYRQQRVSKTKTDNNNSNFTWTGASKYNLNGRESIINPGTAMASHKDDEDKFFPMSGVMIFGKESAGASNTALDNVMITDEEEIKATNPVATERFGTVAVNFQSSSTDPATGDVHVMGALPGMVWQDRDVYLQGPIWAKIPHTDGHSHPSPLMGGFGLKHPPPQILIKNTPVPANPPAEFSATKFASFITQYSTGQVSVEIEWELQKENSKRWNPEVQYTSNYAKSANVDFTVDNNGLYTEPRPIGTRYLTRPL

SEQ ID NO: 769 - protein, 736 aa, Artificial Sequence
  Synthetic polypeptide
MAADGYLPDWLEDNLSEGIREWWDLKPGAPKPKANQQKQDDGRGLVLPGYKYLGPFNGLDKGEPVNAADAAALEHDKAYDQQLKAGDNPYLRYNHADAEFQERLQEDTSFGGNLGRAVFQAKKRVLEPFGLVEEGAKTAPGKKRPVEQSPQEPDSSSGIGKTGQQPAKKRLNFGQTGDSESVPDPQPLGEPPATPAAVGPTTMASGGGAPMADNNEGADGVGNASGNWHCDSTWLGDRVITTSTRTWALPTYNNHLYKQISSASTGASNDNHYFGYSTPWGYFDFNRFHCHFSPRDWQRLINNNWGFRPKRLNFKLFNIQVKEVTTNDGVTTIANNLTSTVQVFSDSEYQLPYVLGSAHQGCLPPFPADVFMIPQYGYLTLNNGSQAVGRSSFYCLEYFPSQMLRTGNNFTFSYTFEEVPFHSSYAHSQSLDRLMNPLIDLYLYYLNRTQNQSGSAQNKDLLFSRGSPAGMSVQPKNWLPGPCYRQQRVSKTKTDNNNSNFTWTGASKYNLNGRESIINPGTAMASHKDDEDKFFPMSGVMIFGKESAGTSNTALDNVMITDEEEIKATNPVATERFGTVAVNFQSSSTDPATGDVHVMGALPGMVWQDRDVYLQGPIWAKIPHTDGHFHPSPLMGGFGLKHPPPQILIKNTPVPANPPAEFSATKFASFITQYSTGQVSVEIEWELQKENSKRWNPEVQYTSNYAKSANVDFTVDNNGLYTEPRPIGTRYLTRPL

SEQ ID NO: 770 - protein, 736 aa, Artificial Sequence
  Synthetic polypeptide
MAADGYLPDWLEDSLSEGIREWWDLKPGAPKPKANQQKQDDGRGLVLPGYKYLGPFNGLDKGEPVNAADAAALEHDKAYDQQLKAGDNPYLRYNHADAEFQERLQEDTSFGGNLGRAVFQAKKRVLEPFGLVEEGAKTAPGKKRPVEQSPQEPDSSSGIGKTGQQPAKKRLNFGQTGDSESVPDPQPLGEPPATPAAVGPTTMASGGGAPMADNNEGADGVGNASGNWHCDSTWLGDRVITTSTRTWALPTYNNHLYKQISSASTGASNDNHYFGYSTPWGYFDFNRFHCHFSPRDWQRLINNNWGFRPKRLNFKLFNIQVKEVTTNDGVTTIANNLTSTVQVFSDSEYQLPYVLGSAHQGCLPPFPADVFMIPQYGYLTPNNGSQAVGRSSFYCLEYFPSQMLRTGNNFTFSYTFEEVPFHSSYAHSQSLDRLMNPLIDQYQYYLNRTQNQSGSAQNKDLLFSRGSPAGMSVQPKNWLPGPCYRQQRVSKTKTDNNNSNFTWTGASKYNLNGRESIINPGTAMASHKDDEDKFFPMSGVMIFGKESAGASNTALDNVMITDEEEIKATNPVATERFGTVAVNFQSSSTDPATGDVHVMGALPGMVWQDRDVYLQGPIWAKIPHTDGHFHPSPLMGGFGLKHPPPQILIKNTPVPANPPAEFSATKFASFITQYSTGQVSVEIEWELQKENSKRWNPEVQYTSNYAKSANVDFTVDNNGLYTEPRPIGTRYLTRPL

SEQ ID NO: 771 - protein, 736 aa, Artificial Sequence; identical to SEQ ID NO: 762
  Synthetic polypeptide

SEQ ID NO: 772 - protein, 735 aa, Artificial Sequence
  Synthetic polypeptide
MAADGYLPDWLEDTLSEGIRQWWKLKPGPPPPKPAERHKDDSRGLVLPGYKYLGPFNGLDKGEPVNEADAAALEHDKAYDRQLDSGDNPYLKYNHADAEFQERLKEDTSFGGNLGRAVFQAKKRVLEPLGLVEEPVKTAPGKKRPVEHSPVEPDSSSGTGKAGQQPARKRLNFGQTGDADSVPDPQPLGQPPAAPSGLGTNTMATGSGAPMADNNEGADGVGNSSGNWHCDSTWMGDRVITTSTRTWALPTYNNHLYKQISSQSGASNDNHYFGYSTPWGYFDFNRFHCHFSPRDWQRLINNNWGFRPKRLNFKLFNIQVKEVTQNDGTTTIANNLTSTVQVFTDSEYQLPYVLGSAHQGCLPPFPADVFMVPQYGYLTLNNGSQAVGRSSFYCLEYFPSQMLRTGNNFTFSYTFEDVPFHSSYAHSQSLDRLMNPLIDQYLYYLSRTNTPSGTTTQSRLQFSRAGASDIRDQSRNWLPGPCYRQQRVSKTSADNNNSEYSWTGATKYHLNGRDSLVNPGPAMASHKDDEEKFFPQSGVLIFGKQGSEKTNVDIEKVMITDEEEIRTTNPVATEQYGSVSTNLQRGNRQAATADVNTQGVLPGMVWQDRDVYLQGPIWAKIPHTDGHFHPSPLMGGFGLKHPPPQILIKNTPVPANPSTTFSAAKFASFITQYSTGQVSVEIEWELQKENSKRWNPEIQYTSNYNKSVNVDFTVDTNGVYSEPRPIGTRYLTRNL

SEQ ID NO: 773 - DNA, 2211 bp, Artificial Sequence
  Synthetic polynucleotide
atggctgctgacggttatcttccagattggctcgaggacaacctttctgaaggcattcgtgagtggtgggctctgaaacctggagtccctcaacccaaagcgaaccaacaacaccaggacaaccgtcggggtcttgtgcttccgggttacaaatacctcggacccggtaacggactcgacaaaggagagccggtcaacgaggcggacgcggcagccctcgaacacgacaaagcttacgaccagcagctcaaggccggtgacaacccgtacctcaagtacaaccacgccgacgccgagtttcaggagcgtcttcaagaagatacgtcttttgggggcaaccttggcagagcagtcttccaggccaaaaagaggatccttgagcctcttggtctggttgaggaagcagctaaaacggctcctggaaagaagaggcctgtagatcagtctcctcaggaaccggactcatcatctggtgttggcaaatcgggcaaacagcctgccagaaaaagactaaatttcggtcagactggcgactcagagtcagtcccagaccctcaacctctcggagaaccaccagcagcccccacaagtttgggatctaatacaatggcttcaggcggtggcgcaccaatggcagacaataacgagggtgccgatggagtgggtaattcctcaggaaattggcattgcgattcccaatggctgggcgacagagtcatcaccaccagcaccagaacctgggccctgcccacttacaacaaccatctctacaagcaaatctccagccaatcaggagcttcaaacgacaaccactactttggctacagcaccccttgggggtattttgactttaacagattccactgccacttctcaccacgtgactggcagcgactcattaacaacaactggggattccggcccaagaaactcagcttcaagctcttcaacatccaagttaaagaggtcacgcagaacgatggcacgacgactattgccaataaccttaccagcacggttcaagtgtttacggactcggagtatcagctcccgtacgtgctcgggtcggcgcaccaaggctgcctcccgccgtttccagcggacgtcttcatggtccctcagtatggatacctcaccctgaacaacggaagtcaagcggtgggacgctcatccttttactgcccggagtacttcccttcgcagatgctaaggactggaaataacttccaattcagctataccttcgaggatgtaccttttcacagcagctacgctcacagccagagtttggatcgcttgatgaatcctcttattgatcagtatctgtactacctgaacagaacgcaaggaacaacctctggaacaaccaaccaatcacggctgctttttagccaggctgggcctcagtctatgtctttgcaggccagaaattggctacctgggccctgctaccggcaacagagactttcaaagactgctaacgacaacaacaacagtaactttccttggacagcggccagcaaatatcatctcaatggccgcgactcgctggtgaatccaggaccagctatggccagtcacaaggacgatgaagaaaaatttttccctatgcacggcaatctaatatttggcaaagaagggacaacggcaagtaacgcagaattagataatgtaatgattacggatgaagaagagattcgtaccaccaatcctgtggcaacagagcagtatggaactgtggcaaataacttgcagagctcaaatacagctcccacgactagaactgtcaatgatcagggggccttacctggcatggtgtggcaagatcgtgacgtgtaccttcaaggacctatctgggcaaagattcctcacacggatggacactttcatccttctcctctgatgggaggctttggactgaaacatccgcctcctcaaatcatgatcaaaaatactccggtaccggcaaatcctccgacgactttcagcccggccaagtttgcttcatttatcactcagtactccactggacaggtcagcgtggaaattgagtgggagctacagaaagaaaacagcaaacgttggaatccagagattcagtacacttccaactacaacaagtctgttaatgtggactttactgtagacactaatggtgtttatagtgaacctcaccctattggaacccggtatctcacacgaaacttgtaa

SEQ ID NO: 774 - DNA, 2211 bp, Artificial Sequence
  Synthetic polynucleotide
atggctgctgatggttatcttccagattggctcgaggacaacctttctgaaggcattcgtgagtggtgggctctgaaacctggagtccctcaacccaaagcgaaccaacaacaccaggacaaccgtcggggtcttgtgcttccgggttacaaatacctcggacccggtaacggactcgacaaaggagagccggtcaacgaggcggacgcggcagccctcgaacacgacaaagcttacgaccagcagctcaaggccggtgacaacccgtacctcaagtacaaccacgccgacgccgagtttcaggagcgtcttcaagaagatacgtcttttgggggcaaccttggcagagcagtcttccaggccaaaaagaggatccttgagcctcttggtctggttgaggaagcagctaaaacggctcctggaaagaagaggcctgtagatcagtctcctcaggaaccggactcatcatctggtgttggcaaatcgggcaaacagcctgccagaaaaagactaaatttcggtcagactggcgactcagagtcagtcccagaccctcaacctctcggagaaccaccagcagcccccacaagtttgggatctaatacaatggcttcaggcggtggcgcaccaatggcagacaataacgagggtgccgatggagtgggtaattcctcaggaaattggcattgcgattcccaatggctgggcgacagagtcatcaccaccagcaccagaacctgggccctgcccacttacaacaaccatctctacaagcaaatctccagccaatcaggagcttcaaacgacaaccactactttggctacagcaccccttgggggtattttgactttaacagattccactgccacttctcaccacgtgactggcagcgactcattaacaacaactggggattccggcccaagaaactcagcttcaagctcttcaacatccaagttaaagaggtcacgcagaacgatggcacgacgactgttgccaataaccttaccagcacggttcaagtgtttacggactcggagtatcaactcccgtacgtgctcgggtcggcgcaccaaggctgtctcccgccgtttccagcggacgtcttcatggtccctcagtatggatacctcaccctgaacaacggaagtcaagcggtgggacgctcatccttttactgcctggagtacttcccttcgcagatgctaaggactggaaataacttccaattcagctataccttcgaggatgtaccttttcacagcagctacgctcacagccagagtttggatcgcttgatgaatcctcttattgatcagtatctgtactacctgaacagaacgcaaggaacaacctctggaacaaccaaccaatcacggctgctttttagccaggctgggcctcagtctatgtctttgcaggccagaaattggctacctgggccctgctaccggcaacagagactttcaaagactgctaacgacaacaacaacagtaactttccttggacagcggccagcaaatatcatctcaatggccgcgactcgctggtgaatccaggaccagctatggccagtcacaaggacgatgaagaaaaatttttccctatgcacggcaatctaatatttggcaaagaagggacaacggcaagtaacgcagaattagataatgtaatgattacggatgaagaagagattcgtaccaccaatcctgtggcaacagagcagtatggaactgtggcaaataacttgcagagctcaaatacagctcccacgactagaactgtcaatgatcagggggccttacctggcatggtgtggcaagatcgtgacgtgtaccttcaaggacctatctgggcaaagattcctcacacggatggacactttcatccttctcctctgatgggaggctttggactgaaacatccgcctcctcaaatcatgatcaaaaatactccggtaccggcaaatcctccgacgactttcagcccggccaagtttgcttcatttatcactcagtactccactggacaggtcagcgtggaaattgagtgggagctacagaaagaaaacagcaaacgttggaatccagagattcagtacacttccaactacaacaagtctgttaatgtggactttactgtagacactaatggtgtttatagtgaacctcgccctattggaacccggtatctcacacgaaacttgtaa

SEQ ID NO: 775 - DNA, 2211 bp, Artificial Sequence
  Synthetic polynucleotide
atggctgctgacggttatcttccagattggctcgaggacaacctttctgaaggcattcgtgagtggtgggctctgaaacctggagtccctcaacccaaagcgaaccaacaacaccaggacaaccgtcggggtcttgtgcttccgggttacaaatacctcggacccggtaacggactcgacaaaggagagccggtcaacgaggcggacgcggcagccctcgaacacgacaaagcttacgaccagcagctcaaggccggtgacaacccgtacctcaagtacaaccacgccgacgccgagtttcaggagcgtcttcaagaagatacgtcttttgggggcaaccttggcagagcagtcttccaggccaaaaagaggatccttgagcctcttggtctggttgaggaagcagctaaaacggctcctggaaagaagaggcctgtagatcagtctcctcaggaaccggactcatcatctggtgttggcaaatcgggcaaacagcctgccagaaaaagactaaatttcggtcagactggcgactcagagtcagtcccagaccctcaacctctcggagaaccaccagcagcccccacaagtttgggatctaatacaatggcttcaggcggtggcgcaccaatggcagacaataacgagggtgccgatggagtgggtaattcctcaggaaattggcattgcgattcccaatggctgggcgacagagtcatcaccaccagcaccagaacctgggccctgcccacttacaacaaccatctctacaagcaaatctccggccaatcaggagcttcaaacgacaaccactactttggctacagcaccccttgggggtattttgactttaacagattccactgccacttctcaccacgtgactggcagcgactcattaacaacaactggggattccggcccaagaaactcagcttcaagctcttcaacatccaagttaaagaggtcacgcagaacgatggcacgacgactattgccaataaccttaccagcacggttcaagtgtttacggactcggagtatcagctcccgtacgtgctcgggtcggcgcaccaaggctgtctcccgccgtttccagcggacgtcttcatggtccctcagtatggatacctcaccctgaacaacggaagtcaagcggtgggacgctcatccttttactgcctggagtacttcccttcgcagatgctaaggactggaaataacttccaattcagctataccttcgaggatgtaccttttcacagcagctacgctcacagccagagtttggatcgcttgatgaatcctcttattgatcagtatctgtactacctgaacagaacgcaaggaacaacctctggaacaaccaaccaatcacggctgctttttagccaggctgggcctcagtctatgtctttgcaggccagaaattggctacctgggccctgctaccggcaacagagactttcaaagactgctaacggcaacaacaacagtaactttccttggacagcggccagcaaatatcatctcaatggccgcgactcgctggtgaatccaggaccagctatggccagtcacaaggacgatgaagaaaaatttttccctatgcacggcaatctaatatttggcaaagaagggacaacggcaagtaacgcagaattagataatgtaatgattacggatgaagaagagattcgtaccaccaatcctgtggcaacagagcagtgtggaactgtggcaaataacttgcagagctcaaatacagctcccacgactagaactgtcaatgatcagggggccttacctggcatggtgtggcaagatcgtgacgtgtaccttcaaggacctatctgggcaaagattcctcacacggatggacactttcatccttctcctctgatgggaggctttggactgaaacatccgcctcctcaaatcatgatcaaaaatactccggtaccggcaaatcctccgacgactttcagcccggccaagtttgcttcatttatcactcagtactccactggacaggtcagcgtggaaattgagtgggagctacagaaagaaaacagcaaacgttggaatccagagattcagtacacttccaactacaacaagtctgttaatgtggactttactgtagacactaatggtgtttatagtgaacctcgccctattggaacccggtatctcacacgaaacttgtaa

SEQ ID NO: 776 - DNA, 2212 bp, Artificial Sequence
  Synthetic polynucleotide
  modified_base (1283)..(1283): a, c, t, or g
  misc_feature (1283)..(1283): n is a, c, g, or t
atggctgctgacggttatcttccagattggctcgaggacaacctttctgaaggcattcgtgagtggtgggctctgaaacctggagtccctcaacccaaagcgaaccaacaacaccaggacaaccgtcggggtcttgtgcttccgggttacaaatacctcggaccgggtaacggactcgacaaaggagagccggtcaacgaggcggacgcggcagccctcgaacacgacaaagcttacgaccagcagctcaaggccggtgacaacccgtacctcaagtacaaccacgccgacgccgagtttcaggagcgtcttcaagaagatacgtcttttgggggcaaccttggcagagcagtcttccaggccaaaaagaggatccttgagcctcttggtctggttgagggagcagctaaaacggctcctggaaagaagaggcctgtagatcagtctcctcaggaaccggactcatcatctggtgttggcaaatcgggcaaacagcctgccagaaaaagactaaatttcggtcagactggcgactcagagtcagtcccagaccctcaacctctcggagaaccaccagcagcccccacaagtttgggatctaatacaatggcttcaggcggtggcgcaccaatggcagacaataacgagggtgccgatggagtgggtaattcctcaggaaattggcattgcgattcccaatggctgggcgacagagtcatcaccaccagcaccagaacctgggccctgcccacttacaacagccatctctacaagcaaatctccagccaatcaggagcttcaaacgacaaccactactttggctacagcaccccttgggggtattttgactttaacagattccactgccacttctcaccacgtgactggcagcgactcattaacaacaactggggattccggcccaagaaactcagcttcaagctcttcaacatccaagttaaagaggtcacgcagaacgatggcacgacgactattgccaataaccttaccagcacggtccaagtgtttacggactcggagtatcagctcccgtacgtgctcgggtcggcgcaccaaggctgtctcccgccgtttccagcggacgccttcatggtccctcagtatggatacctcaccctgaacaacggaagtcaagcggtgggacgctcatccttttactgcctggagtacttcccttcgcagatgctaaggactggaaataacttccaattcagctataccttcgaggatgtaccttttcacggcagctacgctcacagccngagtttggatcgcttgatgaatcctcttattgatcagtatctgtactacctgaacagaacgcaaggaacaacctctggaacaaccaaccaatcacggctgctttttagccaggctgggcctcagtctatgtctttgcaggccagaaattggctacctgggccctgctaccggcaacagagacttttcaaagactgctaacgacaacaacaacagtaactttccttggacagcggccagcaaatatcatctcaatggccgcgactcgctggtgaatccaggaccagctatggccagtcacaaggacgatgaagaaaaatttttccctatgcacggcaatctaatatttggcaaagaagggacaacggcaagtaacgcagaattagataatgtaatgattacggatgaagaagagattcgtaccaccaatcctgtggcaacagagcagtatggaactgtggcaaataacttgcagagctcaaatacagctcccacgactagaactgtcaatgatcagggggccttacctggcatggtgtggcaagatcgtgacgtgtaccttcaaggacctatctgggcaaagattcctcacacggatggacactttcatccttctcctctgatgggaggctttggactgaaacatccgcctcctcaaatcatgatcaaaaatactccggtaccggcaaatcctccgacgactttcagcccggccaagtttgcttcatttatcactcagtactccactggacaggtcagcgtggaaattgagtgggagctacagaaagaaaacagcaaacgttggaatccagagattcagtacacttccaactacaacaagtctgttaatgtggactttactgtagacactaatggtgtttatagtgaacctcgccctattggaacccggtatctcacacgaaactcgtaa

SEQ ID NO: 777 - DNA, 2212 bp, Artificial Sequence
  Synthetic polynucleotide
atggctgctgacggttatcttccagattggctcgaggacaacctttctgaaggcattcgtgagtggtgggctctgaaacctggagtccctcaacccaaagcgaaccaacaacaccaggacaaccgtcggggtcttgtgcttccgggttacaaatacctcggacccggtaacggactcgacaaaggagagccggtcaacgaggcggacgcggcagccctcgaacacgacaaagcttacgaccagcagctcaaggccggtgacaacccgtacctcaagtacaaccacgccgacgccgagtttcaggagcgtcttcaagaagatacgtcttttgggggcaaccttggcagagcagtcttccaggccaaaaagaggatccttgagcctcttggtctggttgagggagcagctaaaacggctcctggaaagaagaggcctgtagatcagtctcctcaggaaccggactcatcatctggtgttggcaaatcgggcaaacagcttgccagaaaaagactaaatttcggtcagactggcgactcagagtcagtcccagaccctcaacctctcggagaaccaccagcagcccccacaagtttgggatctaatacaatggcttcaggcggtggcgcaccaatggcagacaataacgagggtgccgatggagtgggtaattcctcaggaaattggcattgcgattcccaatggctgggcgacagagtcatcaccaccagcaccagaacctgggccctgcccacttacaacagccatctctacaagcaaatctccggccaatcaggagcttcaaacgacaaccactactttggctacagcaccccctgggggtattttgactttaacagattccactgccacttctcaccacgtgactggcagcgactcattaacaacaactggggattccggcccaagaaactcagcttcaagctcttcaacatccaagttaaagaggtcacgcagaacgatggcacgacgactattgccaataaccttaccagcacggttcaagtgtttacggactcggagtatcagctcccgtacgtgctcgggtcggcgcaccaaggctgtctcccgccgtttccagcggacgtcttcatggtccctcagtatggatacctcaccctgaacaacggaagtcaagcggtgggacgctcatccttttactgcctggagtacttcccttcgcagatgctaaggactggaaataacttccaattcagctataccttcgaggatgtaccttttcacagcagctacgctcacagccagagtttggatcgcttgatgaatcctcttattgatcagtatctgtactacctgaacagaacgcaaggaacaacctctggaacaaccaaccaatcacggctgctttttagccaggctgggcctcagtctatgtctttgcaggccagaaattggctacctgggccctgctaccggcaacagagactttcaaagactgctaacgacaacaacaacagtaactttccttggacagcggccagcaaatatcatctcaatggccgcgactcgctggtgaatcccaggaccagctatggccagtcacaaggacgatgaagaaaaatttttccctatgcacggcaatctaatatttggcaaagaagggacaacggcaagtaacgcagaattagataatgtaatgattacggatgaagaagagattcgtaccaccaatcctgtggcaacagagcagtatggaactgtggcaaataacttgcagagctcaaatacagctcccacgactagaactgtcaatgatcagggggccttacctggcatggtgtggcaagatcgtgacgtgtaccttcaaggacctatctgggcaaagattcctcacacggatggacactttcatccttctcctctgatgggaggctttggactgaaacatccgcctcctcaaatcatgatcaaaaatactccggtaccggcaaatcctccgacgactttcagcccggccaagtttgcttcatttatcactcagtactccactggacaggtcagcgtggaaattgagtgggagctacagaaagaaaacagcaaacgttggaatccagagattcagtacacttccaactacaacaagtctgttaatgtggactttactgtagacactaatggtgtttatagtgaacctcgccctattggaacccggtatctcacacgaaacttgtaa

SEQ ID NO: 778 - DNA, 2212 bp, Artificial Sequence
  Synthetic polynucleotide
atggctgctgacggttatcttccagattggctcgaggacaacctttctgaaggcattcgtgagtggtgggctctgaaacctggagtccctcaacccaaagcgaaccaacaacaccaggacgaccgtcggggtcttgtgcttccgggttacaaatacctcggacccggtaacggactcgacaaaggagagccggtcaacgaggcggacgcggcagccctcgaacacgacaaagcttacgaccagcagctcaaggccggtgacaacccgtgcctcaagtacaaccacgccgacgccgagtttcaggagcgtcttcaagaagatacgtcttttgggggcaaccttggcagagcagtcttccaggccaaaaagaggatccttgagcctcttggtctggttgaggaagcagctaaaacggctcctggaaagaagaggcctgtagatcagtctcctcaggaaccggactcatcatctggtgttggcaaatcgggcaaacagcctgccagaaaaagactaaatttcggtcagactggcgactcagagtcagtcccagaccctcaacctctcggagaaccaccagcagcccccacaagtttgggatctaatacaatggcttcaggcggtagcgcaccaatggcagacaataacgagggtgccgatggagtgggtaattcctcaggaaattggcattgcgattcccaatggctgggcgacagagtcatcaccaccagcaccagaacctgggccctgcccacttacaacaaccatctctacaagcaaatctccagccaatcaggagcttcaaacgacaaccactactttggctacagcaccccttgggggtattttgactttaacagattccactgccacttctcaccacgtgactggcagcgactcattaacaacaactggggattccggcccaagaaactcagcttcaagctcttcaacatccaagttaaagaggtcacgcagaacgatggcacgacgactattgccaataaccttaccagcacggttcaagtgtttacggactcggagtatcagctcccgtacgtgctcgggtcggcgcaccaaggctgtctcccgccgtttccagcggacgtcttcatggtccctcagtatggatacctcaccctgaacaacggaagtcaagcggtgggacgctcatccttttactgcctggagtacttcccttcgcagatgctaaggactggaaataacttccaattcagctataccttcgaggatgtaccttttcacagcagctacgctcacagccagagtttggatcgcttgatggatcctcttattgatcagtatctgtactacctgaacagaacgcaaggaacaacctctggaacaaccaaccaatcacggctgctttttagccaggctgggcctcagtctatgtctttgcaggccagaaattggctacctgggccctgctaccggcaacagagactttcaaagactgctaacgacaacaacaacagtaactttccttggacagcggccagcaaatatcatctcaatggccgcgactcgctggtgaatccaggaccagctatggccagtcacaaaggacgatgaagaaaaatttttccctatgcacggcaatctaatatttggcaaagaagggacaacggcaagtaacgcagaattagataatgtaatgattacggatgaagaagagattcgtaccaccaatcctgtggcaacagagcagtatggaactgtggcaaataacttgcagagctcaaatacagctcccacgactagaactgtcaatgatcagggggccttacctggcatggtgtggcaagatcgtgacgtgtaccttcaaggacctatctgggcaaagattcctcacacggatggacactttcatccttctcctctgatgggaggctttggactgaaacatccgcctcctcaaatcatgatcaaaaatactccggtaccggcaaatcctccgacgactttcagcccggccaagtttgcttcatttatcactcagtactccactggacaggtcagcgtggaaattgagtgggagctacagaaagaaaacagcaaacgttggaatccagagattcagtacacttccaactacaacaagtctgttaatgtggactttactgtagacactaatggtgtttatagtgaacctcgccctattggaacccggtatctcacacgaaacctgtaa

SEQ ID NO: 779 - DNA, 2211 bp, Artificial Sequence
  Synthetic polynucleotide
atggctgctgacggttatcttccagattggctcgaggacaacctttctgaaggcattcgtgagtggtgggctctgaaacctggagtccctcaacccaaagcgaaccaacaacaccaggacgaccgtcggggtcttgtgcttccgggttacaaatacctcggacccggtaacggactcgacaaaggagagccggtcaacgaggcggacgcggcagccctcgaacacgacaaagcttacgaccagcagctcaaggccggtgacaacccgtacctcaagtacaaccacgccgacgccgagtttcaggagcgtcttcaagaagatacgtcttttgggggcaaccttggcagagcagtcttccaggccaaaaagaggatccttgagcctcttggtctggttgaggaagcagctaaaacggctcctggaaagaagaggcctgtagatcagtctcctcaggaaccggactcatcatctggtgttggcaaatcgggcaaacagcctgccagaaaaagactaaatttcggtcagactggcgactcagagtcagtcccagaccctcaacctctcggagaaccaccagcagcccccacaagtttgggatctaatacaatggcttcaggcggtggcgcaccaatggcagacaataacgagggtgccgatggagtgggtaattcctcaggaaattggcattgcgattcccaatggctgggcaacagagtcatcaccaccagcaccagaacctgggccctgcccacttacaacaaccatctctacaagcaaatctccagccaatcaggagcttcaaacgacaaccactactttggctacagcaccccttgggggtattttgactttaacagattccactgccacttctcaccacgtgactggcagcgactcattaacaacaactggggattccggcccaagaaactcagcttcaagctcttcaacatccaagttaaagaggtcacgcagaacgatggcacgacgactattgccaataaccttaccagcacggttcaagtgtttacggactcggagtatcagctcccgtacgtgctcgggtcggcgcaccaaggctgtctcccgccgtttccagcggacgtcttcatggtccctcagtatggatacctcaccctgaacaacggaagtcaagcggtgggacgctcatccttttactgcctggagtacttcccttcgcagatgctaaggactggaaataacttccaattcagctataccttcgaggatgtaccttttcacagcagctacgctcacagccagagtttggatcgcttgatgaatcctcttattgatcagtatctgtactacctgaacagaacgcaaggaacaacctctggaacaaccaaccaatcacggctgctttttagccaggctgggcctcagtctatgtctttgcaggccagaaattggctacctgggccctgctaccggcaacagagactttcaaagactgctaacgacaacaacaacagtaactttccttggacagcggccagcaaatatcatctcaatggccgcgactcgctggtgaatccaggaccagctatggccagtcacaaggacgatgaagaaaaatttttccctatgcacggcaatctaatatttggcaaagaagggacaacggcaagtaacgcagaattagataatgtaatgattacggatgaagaagagattcgtaccaccaatcctgtggcaacagagcagtatggaactgtggcaaataacttgcagagctcaaatacagctcccacgactagaactgtcaatgatcagggggccttacctggcatggtgtggcaagatcgtgacgtgtaccttcaaggacctatctgggcaaagattcctcacacggatggacactttcatccttctcctctgatgggaggctttggactgaaacatccgcctcctcaaatcatgatcaaaaatactccggtaccggcaaatcctccgacgactttcagcccggccaagtttgcttcatttatcactcagtactccactggacaggtcagcgtggaaattgagtgggagctacagaaagaaaacagcaaacgttggaatccagagattcagtacacttccaactacaacaagtctgttaatgtggactttactgtagacactaatggtgtttatagtgaacctcgccctattggaacccggtatctcacacgaaacttgtaa

SEQ ID NO: 780 - DNA, 2211 bp, Artificial Sequence
  Synthetic polynucleotide
atggctgctgacggttatcttccagattggctcgaggacaacctttctgaaggcattcgtgagtggtgggctctgaaacctggagtccctcaacccaaagcgaaccaacaacaccaggacgaccgtcggggtcttgtgcttccgggttacaaatacctcggacccggtaacggactcgacaaaggagagccggtcaacgaggcggacgcggcagccctcgaacacgacaaagcttacgaccagcagctcaaggccggtgacaacccgtacctcaagtacaaccacgccgacgccgagtttcaggagcgtcttcaagaagatacgtcttttgggggcaaccttggcagagcagtcttccaggccaaaaagaggatccttgagcctcttggtctggttgaggaagcagctaaaacggctcctggaaagaagaggcctgtagatcagtctcctcaggaaccggactcatcatctggtgttggcaaatcgggcaaacagcctgccagaaaaagactaaatttcggtcagactggcgactcagagtcagtcccagaccctcaacctctcggagaaccaccagcagcccccacaagtttgggatctaatacaatggcttcaggcggtggcgcaccaatggcggacaataacgagggtgccgatggagtgggtaattcctcaggaaattggcattgcgattcccaatggctgggcgacagagtcatcaccaccagcaccagaacctgggccctgcccacttacaacaaccatctctacaagcaaatctccagccaatcaggagcttcaaacgacaaccactactttggctacagcaccccttgggggtattttgactttaacagattccactgccacttctcaccacgtgactggcagcgactcattaacaacaactggggattccggcccaagaaactcagcttcaagctcttcaacatccaagttaaagaggtcacgcagaacgatggcacgacgactattgccaataaccttaccagcacggttcaagtgtttacggactcggagtatcagctcccgtacgtgctcgggtcggcgcaccaaggctgtctcccgccgtttccagcggacgtcttcatggtccctcagtatggatacctcaccctgaacaacggaagtcaagcggtgggacgctcatccttttactgcctggagtacttcccttcgcagatgctaaggactggaaataacttccaattcagctataccttcgaggatgtaccttttcacagcagctacgctcacagccagagtttggatcgcttgatgaatcctcttattgatcagtatctgtactacctgaacagaacgcaaggaacaacctctggaacaaccaaccaatcacggctgctttttagccaggctgggcctcagtctatgtctttgcaggccagaaattggctacctgggccctgctaccggcaacagagactttcaaagactgctaacgacaacaacaacagtaactttccttggacagcggccagcaaatatcatctcaatggccgcgactcgctggtgaatccaggaccagctatggccagtcacaaggacgatgaagaaaaatttttccctatgcacggcaatctaatatttggcaaagaagggacaacggcaagtaacgcagaattagataatgtaatgattacggatgaagaagagattcgtaccaccaatcctgtggcaacagtgcagtatggaactgtggcaaataacttgcagagctcaaatacagctcccacgactagaactgtcaatgatcagggggccttacctggcatggtgtggcaagatcgtgacgtgtaccttcaaggacctatctgggcaaagattcctcacacggatggacactttcatccttctcctctgatgggaggctttggactgaaacatccgcctcctcaaatcatgatcaaaaatactccggtaccggcaaatcctccgacgactttcagcccggccaagtttgcttcatttatcactcagtactccactggacaggtcagcgtggaaattgagtgggagctacagaaagaaaacagcaaacgttggaatccagagattcagtacacttccaactacaacaagtctgttaatgtggactttactgtagacactaatggtgtttatagtgaacctcgccctattggaacccggtatctcacacgaaacttgtaa

SEQ ID NO: 781 - DNA, 2211 bp, Artificial Sequence
  Synthetic polynucleotide
atggctgctgacggttatcttccagattggctcgaggacaacctttctgaaggcattcgtgagtggtgggctctgaaacctggagtccctcaacccaaagcgaaccaacaacaccaggacaaccgtcggggtcttgtgcttccgggttacaaatacctcggacccggtaacggactcgacaaaggagagccggtcaacgaggcggacgcggcagccctcgaacacgacaaagcttacgaccagcagctcaaggccggtgacaacccgtacctcaagtacaaccacgccgacgccgagtttcaggagcgtcttcaagaagatacgtcttttgggggcaaccttggcagagcagtcttccaggccaaaaaggggatccttgagcctcttggtctggttgaggaagcagctaaaacggctcctggaaagaagaggcctgtagatcagtctcctcaggaaccggactcatcatctggtgttggcaaatcgggcaaacagcctgccagaaaaagactaaatttcggtcagactggcgactcagagtcagtcccagaccctcaacctctcggagaaccaccagcagcccccacaagtttgggatctaatacaatggcttcaggcggtggcgcaccaatggcagacaataacgagggtgccgatggagtgggtaattcctcaggaaattggcattgcgattcccaatggctgggcgacagagtcatcaccaccagcaccagaacctgggccctgcccacttacaacaaccatctctacaagcaaatctccagccaatcaggagcttcaaacgacaaccactactttggctacagcaccccttgggggtattttgactttaacagattccactgccacttctcaccacgtgactggcagcgactcattaacaacaactggggattccggcccaagaaactcagcttcaagctcttcaacatccaagttaaagaggtcacgcagaacgatggcacgacgactattgccaataaccttaccagcacggttcaagtgtttacggactcggagtatcagctcccgtacgtgttcgggtcggcgcaccaaggctgtctcccgccgtttccagcggacgtcttcatggtccctcagtatggatacctcaccctgaacaacggaagtcaagcggtgggacgctcatccttttactgcctggagtacttcccttcgcagatgctaaggactggaaataacttccaattcagctataccttcgaggatgtaccttttcacagcagctacgctcacagccagagttcggatcgcttgatgaatcctcttattgatcagtatctgtactacctgaacagaacgcaaggaacaacctctggaacaaccaaccaatcacggctgctttttagccaggctgggcctcagtctatgtctttgcaggccagaaattggctacctgggccctgctaccggcaacagagactttcaaagactgctaacgacaacaacaacagtaactttccttgaacagcggccagcaaatatcatctcaatggccgcgactcgctggtgaatccaggaccagctatggccagtcacaaggacgatgaagaaaaatttttccctatgcacggcaatctaatatttggcaaagaagggacaacggcaagtaacgcagaattagataatgtaatgattacggatgaagaagagattcgtaccaccaatcctgtggcaacagagcagtatggaactgtggcaaataacttgcagagctcaaatacagctcccacgactagaactgtcaatgatcagggggccttacctggcatggtgtggcaagatcgtgacgtgtaccttcaaggacctatctgggcaaagattcctcacacggatggacactttcatccttctcctctgatgggaggctttggactgaaacatccgcctcctcaaatcatgatcaaaaatactccggtaccggcaaatcctccgacgactttcagcccggccaagtttgcttcatttatcactcagtactccactggacaggtcagcgtggaaattgagtgggagctacagaaagaaaacagcaaacgttggaatccagagattcagtacacttccaactacaacaagtctgttaatgtggactttactgtagacactaatggtgtttatagtgaacctcgccctattggaacccggtatctcacacgaaacttgtaa

SEQ ID NO: 782 - DNA, 2211 bp, Artificial Sequence
  Synthetic polynucleotide
atggctgctgacggttatcttccagattggctcgaggacaacctttctgaaggcattcgtgagtggtgggctctgaaacctggagtccctcaacccaaagcgaaccaacaacaccaggacaaccgtcggggtcttgtgcttccgggttacaaatacctcggacccggtaacggactcgacgaaggagagccggtcaacgaggcggacgcggcagccctcgaacacgacaaagcttacgaccagcagctcaaggccggtgacaacccgtacctcaagtacaaccacgccgacgccgagtttcaggagcgtcttcaagaagatacgtcttttgggggcaaccttggcagagcagtcttccaggccaaaaagaggatccttgagcctcttggtctggttgagggagcagctaaaacggctcctggaaagaagaggcctgtagatcagtctcctcaggaaccggactcatcatctggtgttggcaaatcgggcaaacagcctgccagaaaaagactaaatttcggtcagactggcgactcagagtcagtcccagaccctcaacctctcggagaaccaccagcagcccccacaagtttgggatctaatacaatggcttcaggcggtggcgcaccaatggcagacaataacgagggtgccgatggagtgggtaattcctcaggaaattggcattgcgattcccaatggctgggcgacagagtcatcaccaccagcaccagaacctgggccctgcccacttacaacagccacctctacaagcaaatctccagccaatcaggagcttcaaacgacaaccactactttggctacagcaccccttgggggtattttgactttaacagattccactgccacttctcaccacgtgactggcagcgactcattaacaacaactggggattccggcccaagaaactcagcttcaagctcttcaacatccaagttaaagaggtcacgcagaacgatggcacgacgactattgccaataaccttaccagcacggttcaagtgtttacggactcggagtatcagctcccgtacgtgctcgggtcggcgcaccaaggctgtctcccgccgtttccagcggacgtcttcatggtccctcagtatggatacctcaccctgaacaacggaagtcaagcggtgggacgctcatccttttactgcctggagtacttcccttcgcagatgctaaggactggaaataacttccaattcagctataccttcgaggatgtaccttttcacagcagctacgctcacagccagagtttggatcgcttgatgaatcctcttattgatcagtatctgtactacctgaacagaacgcaaggaacaacctctggaacaaccaaccaatcacggctgctttttagccaggctgggcctcagtctatgtctttgcaggccagaaattggctacctgggccctgctaccggcaacagagactttcaaagactgctaacgacaacaacaacagtaactttccttggacagcggccagcaaatatcatctcaatggccgcgactcgctggtgaatccaggaccagctatggccagtcacaaggacgatgaagaaaaatttttccctatgcacggcaatctaatatttggcaaagaagggacaacggcaagtaacgcagaattagataatgtaatgattacggatgaagaagagattcgtaccaccaatcctgtggcaacagagcagtatggaactgtggcaaataacttgcagagctcaaatacagctcccacgactagaactgtcaatgatcagggggccttacctggcatggtgtggcaagatcgtgacgtgtaccttcaaggacctatctgggcaaagattcctcacacggatggacactttcatccttctcctctgatgggaggctttggactgaaacatccgcctcctcaaatcatgatcaaaaatactccggtaccggcaaatcctccgacgactttcagcccggccaagtttgcttcatttatcactcagtactccactggacaggtcagcgtggaaattgagtgggagctacagaaagaaaacagcaaacgttggaatccagagattcagtacacttccaactacaacaagtctgttaatgtggactttactgtagacactaatggtgtttatagtgaacctcgccctattggaacccggtatctcacacgaaacttgtaa

SEQ ID NO: 783 - DNA, 2211 bp, Artificial Sequence
  Synthetic polynucleotide
atggctgctgacggttatcttccagattggctcgaggacaacctttctgaaggcattcgtgagtggtgggctctgaaacctggagtccctcaacccaaagcgaaccaacaacaccaggacaaccgtcggggtcttgtgcttccgggttacaaatacctcggacccggtaacggactcgacaaaggagagccggtcaacgaggcggacgcggcagccctcgaacacgacaaagcttacgaccagcagctcaaggccggtgacaacccgtacctcaagtacaaccacgccgacgccgagtttcaggagcgtcttcaagaagatacgtcttttgggggcaaccttggcagagcagtcttccaggccaaaaagaggatccttgagcctcttggtctggttgagggagcagctaaaacggctcctggaaagaagaggcctgtagatcagtctcctcaggaaccggactcatcatctggtgttggcaaatcgggcaaacagcctgccagaaaaagactaaatttcggtcagactggcgactcagagtcagtcccagaccctcaacctctcggagaaccaccagcagcccccacaagtttgggatctaatacaatggcttcaggcggtggcgcaccaatggcagacaataacgagggtgccgatggagtgggtaattcctcaggaaattggcattgcgattcccaatggctgggcgacagagtcatcaccaccagcaccagaacctgggccctgcccacttacaacagccatctctacaagcaaatctccagccaatcaggagcttcaaacgacaaccactactttggctacagcaccccttggggtattttgactttaacagattccactgccacttctcaccacgtgactggcagcgactcattaacaacaactggggattccggcccaagaaactcagcttcaagctcttcaacatccaagttaaagaggtcacgcagaacgatggcacgacgactattgccaataaccttaccagcacggttcaagtgtttacggactcggagtatcagctcccgtacgtgctcgggtcggcgcaccaaggctgtctcccgccgtttccagcggacgccttcatggtccctcagtatggatacctcaccctgaacaacggaagtcaagcggtgggacgctcatccttttactgcctggagtacttcccttcgcagatgctaaggactggaaataacttccaattcagctataccctcgaggatgtaccttttcacagcagctacgctcacagccagagtttggatcgcttgatgaatcctcttattgatcagtatctgtactacctgaacagaacgcaaggaacaacctctggaacaaccaaccaatcacggctgctttttagccaggctgggcctcagtctatgtctttgcaggccagaaattggctacctgggccctgctaccggcaacagagactttcaaagactgctaacgacaacaacaacagtaactttccttggacagcggccagcaaatatcatctcaatggccgcgactcgctggtgaatccaggaccagctatggccagtcacaaaggacgatgaagaaaaatttttccctatgcacggcaatctaatatttggcaaagaagggacaacggcaagtaacgcagaattagatagtgtaatgattacggatgaagaagagattcgtaccaccaatcctgtggcaacagagcagtatggaactgtggcaaataacttgcagagctcaaatacagctcccacgactagaactgtcaatgatcagggggccttacctggcatggtgtggcaagatcgtgacgtgtaccttcaaggacctatctgggcaaagattcctcacacggatggacactttcatccttctcctctgatgggaggctttggactgaaacatccgcctcctcaaatcatgatcaaaaatactccggtaccggcaaatcctccgacgactttcagcccggccaagtttgcttcatttatcactcagtactccactggacaggtcagcgtggaaattgagtgggagctacagaaagaaaacagcaaacgttggaatccagagattcagtacacttccaactacaacaagtctgttaatgtggactttactgtagacactaatggtgtttatagtgaacctcgccctattggaacccggtatctcacacgaaacttgtaa

SEQ ID NO: 784 - DNA, 2205 bp, Artificial Sequence
  Synthetic polynucleotide
atgactgacggttaccttccagattggctagaggacaacctctctgagggcgttcgagagtggtgggcgctgcaacctggagcccctaaacccaaggcaaatcaacaacatcaggacaacgctcggggtcttgtgcttccgggttacaaatacctcggacccggcaacggactcgacaagggggaacccgtcaacgcagcggacgcggcagccctcgagcacgacaaggcctacgaccagcagctcaaggccggtgacaacccctacctcaagtacaaccacgccgacgcggagttccagcagcggcttcagggcgacacatcgtttgggggcaacctcggcagagcagtcttccaggccaaaaagagggttcttgaacctcttggtctggttgagcaagcgggtgagacggctcctggaaagaagagaccgttgattgaatccccccagcagcccgactcctccacgggtatcggcaaaaaaggcaagcagccggctaaaaagaagctcgttttcgaagacgaaactggagcaggcgacggaccccctgagggatcaacttccggagccatgtctgatgacagtgagatgcgtgcagcaactggcggagctgcagtcgagggcggacaaggtgccgatggagtgggtaatgcctcgggtgattggcattgcgattccacctggtctgagggccacgtcacgaccaccagcaccagaacctgggtcttgcccacctacaacaaccacctctacaagcgactcggagagagcctgcagtccaacacctacaacggattctccaccccctggggatactttgacttcaaccgcttccactgccacttctcaccacgtgactggcagcgactcatcaacaacaactggggcatgcgacccaaagccatgcgggtcaaaatcttcaacatccaggtcaaggaggtcacgacgtcgaacggcgagacaacggtggctaataaccttaccagcacggttcagatctttgcggactcgtcgtacgaactgccgtacgtgatggatgcgggtcaagagggcagcctgcctccttttcccaacgacgtctttatggtgccccagtacggctactgtggactggtgaccggcaacacttcgcagcaacagactgacagaaatgccttctactgcctggagtactttccttcgcagatgctgcggactggcaacaactttgaaattacgtacagttttgagaaggtgcctttccactcgatgtacgcgcacagccagagcctggaccggctgatgaaccctctcatcgaccagtacctgtggggactgcaatcgaccaccaccggaaccaccctgaatgccgggactgccaccaccaactttaccaagctgcggcctaccaacctttccaactttaaaaagaactggctgcccgggccttcaatcaagcagcagggcttctcaaagactgccaatcaaaactacaagatccctgccaccgggtcagacagtctcatcaaatacgagacgcacagcactctggacggaagatggagtgccctgacccccggacctccaatggccacggctggacctgcggacagcaagttcagcaacagccagctcatctttgcggggcctaaacagaacggcaacacggccaccgtacccgggactctgatcttcacctctgaggaggagctggcagccaccaacgctaccgatacggacatgtggggcaacctacctggcggtgaccagagcaacagcaacctgccgaccgtggacagactgacagccttgggagccgtgcctggaatggtctggcaaaacagagacatttactaccagggtcccatttgggccaagattcctcataccgatggacactttcacccctcaccgctgattggtgggtttgggctgaaacacccgcctcctcaaatttttatcaagaacaccccggtacctgcgaatcctgcgacgaccttcagctctactccggtaaactccttcattactcagtacagcactggccaggtgtcggtgcagattgactgggagatccagaaggagcggtccaaacgctggaaccccgaggtccagtttacctccaactacggacagcaaaactctctgttgtgggctcccgatgcggctgggaaatacactgagcctagggctatcggtacccgctacctcacccaccacctgtaa

SEQ ID NO: 785 - DNA, 2205 bp, Artificial Sequence
  Synthetic polynucleotide
atgactgacggttaccttccagattggctagaggacaacctctctgaaggcgttcgagagtggtgggcgctgcaacctggagcccctaaacccaaggcaaatcaacaacatcaggacaacgctcggggtcttgtgcttccgggttacaaatacctcggacccggcaacggactcgacaagggggaacccgtcaacgcagcggacgcggcagccctcgagcacgacaaggcctacgaccagcagctcaaggccggtgacaacccctacctcaagtacaaccacgccgacgcggagttccagcagcggcttcagggcgacacatcgtttgggggcaacctcggcagagcagtcttccaggccaaaaagagggttcttgaacctcttggtctggttgagcaagcgggtgagacggctcctggaaagaagagaccgttgattgaatccccccagcagcccgactcctccacgggtatcggcaaaaaaggcaagcagccggctaaaaagaagctcgttttcgaagacgaaactggagcaggcgacggaccccctgagggatcaacttccggagccatgtctgatgacagtgagatgcgtgcagcagctggcggagctgcagtcgagggcggacaaggtgccgatggagtgggtaatgcctcgggtgattggcattgcgattccacctggtctgagggccacgtcacgaccaccagcaccagaacctgggtcttgcccacctacaacaaccacctctacaagcgactcggagagagcctgcagtccaacacctacaacggattctccaccccctggggatactttgacttcaaccgcttccactgccacttcttaccacgtgactggcagcgactcatcaacaacaactggggcgtgcgacccaaagccatgcgggtcaaaatcttcaacatccaggtcaaggaggtcacgacgtcgaacggcgagacaacggtggctaataaccttaccagcacggttcagatctttgcggactcgtcgtacgaactgccgtacgtgatggatgcgggtcaagagggcagcctgcctccttttcccaacgacgtctttatggtgccccagtacggctactgtggactggtgaccggcgacacttcgcagcaacagactgacagaaatgccttctactgcctggagtactttccttcgcagatgctgcggactggcaacaactttgaaattacgtacagttttgagaaggtgcctttccactcgatgtacgcgcacagccagagcctggaccggctgatgaaccctctcatcgaccagtacctgtggggactgcaatcgaccaccaccggaaccaccctgaatgccgggactgccaccaccaactttaccaagctgcggcctaccaacttttccaactttaaaaagaactggctgcccgggccttcaatcaagcagcagggcttctcaaagactgccaatcaaaactacaagatccctgccaccgggtcagacagtctcatcaaatacgagacgcacagcactctggacggaagatggagtgccctgacccccggacctccaatggccacggctggacctgcggacagcaagttcagcaacagccagctcatctttgcggggcctaaacagaacggcaacacggccaccgtacccgggactctgatcttcacctctgaggaggagctggcagccaccaacgccaccgatacggacatgtggggcaacctacctggcggtgaccagagcaacagcaacctgccgaccgtggacagactgacagccttgggagccgtgcctggaatggtctggcaaaacagagacatttactaccagggtcccatttgggccaagattcctcataccgatggacactttcacccctcaccgctgattggtgggtttgggctgaaacacccgcctcctcaaatttttatcaagaacaccccggtacctgcgaatcctgcgacgaccttcagctctactccggtaaactccttcattactcagtacagcactggccaggtgtcggtgcagattgactgggagatccagaaggagcggtccaaacgctggaaccccgaggtccagtttacctccaactacggacagcaaaactctctgttgtgggctcccgatgcggctgggaaatacactgagcctagggctatcggtacccgctacctcacccaccacctgtaa

SEQ ID NO: 786 - DNA, 2205 bp, Artificial Sequence
  Synthetic polynucleotide
atgactgacggttaccttccagattggctagaggacaacctctctgaaggcgttcgagagtggtgggcgctgcaacctggagcccctaaacccaaggcaaatcaacaacatcaggacaacgctcggggtcttgtgcttccgggttacaaatacctcggacccggcaacggactcgacgagggggaacccgtcaacgcagcggacgcggcagccctcgagcacgacaaggcctacgaccagcagctcaaggccggtgacaacccctacctcaagtacaaccacgccgacgcggagttccagcagcggcttcagggcgacacatcgtttgggggcaacctcggcagagcagtcttccaggccaaaaagagggttcttgaacctcttggtctggttgagcaagcgggtgagacggctcctggaaagaagagaccgttgattgaatccccccagcagcccgactcctccacgggtatcggcaaaaaaggcaagcagccggctaaaaagaagctcgttttcgaagacgaaactggagcaggcgacggaccccctgagggatcaacttccggagccatgtctgatgacagtgagatgcgtgcagcagctggcggagctgcagtcgagggcggacaaggtgccgatggagtgggtaatgcctcgggtgattggcattgcgattccacctggtctgagggccacgtcacgaccaccagcaccagaacctgggtcttgcccacctacaacaaccacctctacaagcgactcggagagagcctgcagtccaacacctacaacggattctccaccccctggggatactttgacttcaaccgcttccactgccacttctcaccacgtgactggcagcgactcatcaacaacaactggggcatgcgacccaaagccatgcgggtcaaaatcttcaacatccaggtcaaggaggtcacgacgtcgaacggcgagacaacggtggctaataaccttaccagcacggttcagatctttgcggactcgtcgtacgaactgccgtacgtgatggatgcgggtcaagagggcagcctgcctccttttcccaacgacgtctttatggtgccccagtacggctactgtggactggtgaccggcaacacttcgcagcaacagactgacagaaatgccttctactgcctggagtactttccttcgcagatgctgcggactggcaacaactttgaaattacgtacagttttgagaaggtgcctttccactcgatgtacgcgcacagccagagcctggaccggctgatgaaccctctcatcgaccagtacctgtggggactgcaatcgaccaccaccggaaccaccctgaatgccgggactgccaccaccaactttaccaagctgcggcctaccaacttttccaactttaaaaagaactggctgcccgggccttcaatcaagcagcagggcttctcaaagactgccaatcaaaactacaagatccctgccaccgggtcagacagtctcatcaaatacgagacgcacagcactctggacggaagatggagtgccctgacccccggacctccaatggccacggctggacctgcggacagcaagttcagcaacagccagctcatctttgcggggcctaaacagaacggcaacacggccaccgtacccgggactctgatcttcacctctgaggaggagctggcagccaccaacgctaccgatacggacatgtggggcaacctacctggcggtgaccagagcaacagcaacctgccgaccgtggacagactgacagccttgggagccgtgcctggaatggtctggcaaaacagagacatttactaccagggtcccatttgggccaagattcctcataccgatggacactttcacccctcaccgctgattggtgggtttgggctgaaacacccgcctcctcaaatttttatcaagaacaccccggtacctgcgaatcctgcgacgaccttcagctctactccggtaaactccttcattactcagtacagcactggccaggtgtcggtgcagattgactgggagatccagaaggagcggtccaaacgctggaaccccgaggtccagtttacctccaactacggacagcaaaactctctgttgtgggctcccgatgcggctgggaaatacactgagcctagggctatcggtacccgctacctcacccaccacctgtaa

SEQ ID NO: 787 - DNA, 2205 bp, Artificial Sequence
  Synthetic polynucleotide
atgactgacggttaccttccagattggctagaggacaacctctctgaaggcgttcgagagtggtgggcgctgcaacctggagcccctaaacccaaggcaaatcaacaacatcaggacaacgctcggggtcttgtgcttccgggttacaaatacctcggacccggcaacggactcgacaagggggaacccgtcaacgcagcggacgcggcagccctcgagcacgacaaggcctacgaccagcagctcaaggccggtgacaacccctacctcaagtacaaccacgccgacgcggagttccagcagcggcttcagggcgacacatcgtttgggggcaacctcggcagagcagtcttccaggccaaaaagagggttcttgaacctcttggtctggttgagcaagcgggtgagacggctcctggaaagaagagaccgttgattgaatccccccagcagcccgactcctccacgggtatcggcaaaaaaggcaagcagccggctaaaaagaagctcgttttcgaagacggaactggagcaggcgacggaccccctgagggatcaacttccggagccatgtctgatgacagtgagatgcgtgcagcagctggcggagctgcagtcgagggcggacaaggtgccgatggagtgggtaatgcctcgggtgattggcattgcgattccacctggtctgagggccacgtcacgaccaccagcaccagaacctgggtcttgcccacctacaacaaccacctctacaagcgactcggagagagcctgcagtccaacacctacaacggattccccaccccctggggatactttgacttcaaccgcttccactgccacttctcaccacgtgactggcagcgactcatcaacaacaactggggcatgcgacccaaagccatgcgggtcaaaatcttcaacatccaggtcaaggaggtcacgacgtcgaacggcgagacaacggcggctaataaccttaccagcacggttcagatctttgcggactcgtcgtacgaactgccgtacgtgatggatgcgggtcaagagggcagcctgcctccttttcccaacgacgtctttatggtgccccagtacggctactgtggactggtgaccggcaacacttcgcagcaacagactgacagaaatgccttctactgcctggagtactttccttcgcagatgctgcggactggcaacaactttgaaattacgtacagttttgagaaggtgcctttccactcgatgtacgcgcacagccagagcctggaccggctgatgaaccctctcatcgaccagtacctgtggggactgcaatcgaccaccaccggaaccaccctgaatgccgggactgccaccaccaactttaccaagctgcggcctaccaacttttccaactttaaaaagaactggctgcccgggccttcaatcaagcagcagggcttctcaaagactgccaatcaaaactacaagatccctgccaccgggtcagacagtctcatcaaatacgagacgcacagcactctggacggaagatggagtgccctgacccccggacctccaatggccacggctggacctgcggacagcaagttcagcaacagccagctcatctttgcggggcctaaacagaacggcaacacggccaccgtacccgggactctgatcttcacctctgaggaggagctggcagccaccaacgccaccgatacggacatgtggggcaacctacctggcggtgaccagagcaacagcaacctgccgaccgtggacagactgacagccttgggagccgtgcctggaatggtctggcaaaacagagacatttactaccagggtcccatttgggccaagattcctcataccgatggacactttcacccctcaccgctgattggtgggtttgggctgaaacacccgcctcctcaaatttttatcaagaacaccccggtacctgcgaatcctgcgacgaccttcagctctactccggtaaactccttcattactcagtacagcactggccaggtgtcggtgcagattgactgggagatccagaaggagcggtccaaacgctggaaccccgaggtccagtttacctccaactacggacagcaaaactctctgttgtgggctcccgatgcggctgggaaatacactgagcctagggctatcggtacccgctacctcacccaccacctgtaa

SEQ ID NO: 788 - DNA, 2205 bp, Artificial Sequence
  Synthetic polynucleotide
atgactgacggttaccttccagattggctagaggacaacctctctgaaggcgttcgagagtggtgggcgctgcaacctggagcccctaaacccaaggcaaatcaacaacatcaggacaacgctcggggtcttgtgcttccgggttacaaatacctcggacccggcaacggactcgacaagggggaacccgtcaacgcagcggacgcggcagccctcgagcacgacaaggcctacgaccagcagctcaaggccggtgacaacccctacctcaagtacaaccacgccgacgcggagttccagcagcggcttcagggcgacacatcgtttgggggcaacctcggcagagcagtcttccaggccaaaaagagggttcttgaacctcttggtctggttgagcaagcgggtgagacggctcctggaaagaagagaccgttgattgaatccccccagcagcccgactcctccacgggtatcggcaaaaaaggcaagcagccggctaaaaagaagctcgttttcgaagacgaaactggagcaggcgacggaccccctgagggatcaacttccggagccatgtctgatgacagtgagatgcgtgcagcagctggcggagctgcagtcgagggcggacaaggtgccgatggagtgggtaatgcctcgggtgattggcattgcgattccacctggtctgagggccacgtcacgaccaccagcaccagaacctgggtcttgcccacctacaacaaccacctctacaagcgactcggagagagcctgcagtccaacacctacaacggattctccaccccctggggatactttgacttcaaccgcttccactgccacttctcaccacgtgactggcagcgactcatcaacaacaactggggcatgcgacccaaagccatgcgggtcaaaatcttcaacatccaggtcaaggaggtcacgacgtcgaacggcgagacaacggtggctaataaccttaccagcacggttcagatctttgcggactcgtcgtacgaactgccgtacgtgatggatgcgggtcaagagggcagcctgcctccttttcccaacgacgtctttatggtgccccagtacggctaccgtggactggtgaccggcaacacttcgcagcaacagactgacagaaatgccttctactgcctggagtactttccttcgcagatgctgcggactggcaacaactttgaaattacgtacagttttgagaaggtgcctttccactcgatgtacgcgcacagccagagcctggaccggctgatgaaccctctcatcgaccagtacctgtggggactgcaatcgaccaccaccggaaccaccctgaatgccgggactgccaccaccaactttaccaagctgcggcctaccaacttttccaactttaaaaagaactggctgcccgggccttcaatcaagcagcagggcttctcaaagactgccaatcaaaactacaagatccctgccaccgggtcagacagtctcatcaaatacgagacgcacagcactctggacggaagatggagtgccctgacccccggacctccaatggccacggctggacctgcggacagcaagttcagcaacagccagctcatctttgcggggcctaaacagaacggcaacacggccaccgtacccgggactctgatcttcacctctgaggaggagctggcagccaccaacgccaccgatacggacatgtggggcaacctacctggcggtgaccagagcaacagcaacctgccgaccgtggacagactgacagccttgggagccgtgcctggaatggtctggcaaaacagagacatttactaccagggtcccatttgggccaagattcctcataccgatggacactttcacccctcaccgctgattggtgggtttgggctgaaacacccgcctcctcaaatttttatcaagaacaccccggtacctgcgaatcctgcgacgaccttcagctctactccggtaaactccttcattactcagtacagcactggccaggtgtcggtgcagattgactgggagatccagaaggagcggtccaaacgctggaaccccgaggtccagtttacctccaactacggacagcaaaactctctgttgtgggctcccgatgcggctgggaaatacactgagcctagggctatcggtacccgctacctcacccaccacctgtaa

SEQ ID NO: 789 - DNA, 2205 bp, Artificial Sequence
  Synthetic polynucleotide
atgactgacggttaccttccagattggctagaggacaacctctctgaaggcgttcgagagtggtgggcgctgcaacctggagcccctaaacccaaggcaaatcaacaacatcaggacaacgctcggggtcttgtgcttcagggttacaaatacctcggacccggcaacggactcgacaagggggaacccgtcaacgcagcggacgcggcagccctcgagcacgacaaggcctacgaccagcagctcaaggccggtgacaacccctacctcaagtacaaccacgccgacgcggagttccagcagcggcttcagggcgacacatcgtttgggggcaacctcggcagagcagtcttccaggccaaaaagagggttcttgaaccccttggtctggttgagcaagcgggtgagacggctcctggaaagaagagaccgttgattgaatccccccagcagcccgactcctccacgggtatcggcaaaaaaggcaagcagccggctaaaaagaagctcgttttcgaagacgaaactggagcaggcgacggaccccctgagggatcaacttccggagccatgtctgatgacagtgagatgcgtgcagcagctggcggagctgcagtcgagggcggacaaggtgccgatggagtgggtaatgcctcgggtgattggcattgcgattccacccggtctgagggccacgtcacgaccaccagcaccagaacctgggtcttgcccacctacaacaaccacctctacaagcgactcggagagagcctgcagtccaacacctacaacggattctccaccccctggggatactttgacttcaaccgcttccactgccacttctcaccacgtgactggcagcgactcatcaacaataactggggcatgcgacccaaagccatgcgggtcaaaatcttcaacatccaggtcaaggaggtcacgacgtcgaacggcgagacaacggtggctaataaccttaccagcacggttcagatctttgcggactcgtcgtacgaactgccgtacgtgatggatgcgggtcaagagggcagcctgcctccttttcccaacgacgtctttatggtgccccagtacggctactgtggactggtgaccggcaacacttcgcagcaacagactgacagaaatgccttctactgcctggagtactttccttcgcagatgctgcggactggcaacaactttgaaattacgtacagttttgagaaggtgcctttccactcgatgtacgcgcacagccagagcctggaccggctgatgaaccctctcatcgaccagtacctgtggggactgcaatcgaccaccaccggaaccaccctgaatgccgggactgccaccaccaactttaccaagctgcggcctaccaacttttccaactttaaaaagaactggctgcccgggccttcaatcaagcagcagggcttctcaaagactgccaatcaaaactacaagatccctgccaccgggtcagacagtctcatcaaatacgagacgcacagcactctggacggaagatggagtgcccggacccccggacctccaatggccacggctggacctgcggacagcaagttcagcaacagccagctcatctttgcggggcctaaacagaacggcaacacggccaccgtacccgggactctgatcttcacctctgaggaggagctggcagccaccaacgccaccgatacggacatgtggggcaacctacctggcggtgaccagagcaacagcaacctgccgaccgtggacagactgacagccttgggagccgtgcctggaatggtctggcaaaacagagacatttactaccagggtcccatttgggccaagattcctcataccgatggacactttcacccctcaccgctgattggtgggtttgggctgaaacacccgcctcctcaaatttttatcaagaacaccccggtacctgcgaatcctgcgacgaccttcagctctactccggtaaactccttcattactcagtacagcactggccaggtgtcggtgcagattgactgggagatccagaaggagcggtccaaacgctggaaccccgaggtccagtttacctccaactacggacagcaaaactctctgttgtgggctcccgatgcggctgggaaatacactgagcctagggctatcggtacccgctacctcacccaccacctgtaa

SEQ ID NO: 790 - DNA, 2175 bp, Artificial Sequence
  Synthetic polynucleotide
atgtcttttgttgatcaccctccagattggttggaagaagttggtgaaggtcttcgcgagtttttgggccttgaagcgggcccaccgaaaccaaaacccaatcagcagcatcaagatcaagcccgtggtcttgtgctgcctggttataactatctcggacccggaaacggtctcgatcgaggagagcctgtcaacagggcagacgaggtcgcgcgagagcacgacatctcgtacaacgagcagcttgaggcgggagacaacccctacctcaagtacaaccacgcggacgccgagtttcaggagaggctcgccgacgacacatccttcgggggaaacctcggaaaggcagtctttcaggccaagaaaagggttctcgaaccttttggcctggttgaagagggtgctaagacggcccctaccggaaagcggatagacgaccactttccaaaaagaaagaaggcccggaccgaagaggactccaagccttccacctcgtcagacgccgaagctggacccagcggatcccagcagctgcaaatcccagcccaaccagcctcaagtttgggagctgatacaatgtctgcgggaggtggcggcccattgggcgacaataaccaaggtgccgatggagtgggcaatgcctcgggagattggcattgcgattccacgtggatgggggacagagtcgtcaccaagtccacccgaacctgggtgctgcccagctacaacaaccaccagtaccgagagatcaaaagcggctccgtcgacggaagcaacgccaacgcctactttggatacagcaccccctgggggtactttgactttaaccgcttccacagccactggagcccccgagactggcaaagactcatcaacaactactggggcttcagaccccggtccctcagagtcaaaatcttcaacattcaagtcaaagaggtcacggtgcaggactccaccaccaccatcgccaacaacctcacctccaccgtccaagtgtttacggacgacgactaccagctgccctacgtcgtcggcaacgggaccgagggatgcctgccggccttccctccgcaggtctttacgctgccgcagtacggttacgcgacgctgaaccgcgacaacacagaaaatcccaccgagaggagcagcttcttctgcctagagtactttcccagcaagatgctgagaacgggcaacaactttgagtttacctacaactttgaggaggtgcccttccactccagcttcgctcccagtcagaacctcttcaagctggccaacccgctggtggaccagtacttgtaccgcttcgtgagcacaaataacactggcggagtccagttcaacaagaacctggccgggagatacgccaacacctacaaaaactggttcccggggcccatgggccgaacccagggctggaacctgggctccggggtcaaccgcgccagtgtcagcgccttcgccacgaccaataggatggagctcgagggcgcgagttaccaggtgcccccgcagccgaacggcatgaccaacaacctccagggcagcaacacctatgccctggagaacactatgatcttcaacagccagccggcgaacccgggcaccaccgccacgtacctcgagggcaacatgctcatcaccagcgagagcgagacgcagccggtgaaccgcgtggcgtacaacgtcggcgggcagatggccaccaacaaccagagctccaccactgcccccgcgaccggcacgtacaacctccaggaaatcgtgcccggcagcgtgtggatggagagggacgtgtacctccaaggacccatctgggccaagatcccagagacggaggcgcactttcacccctctccggccatgggcggattcggactcaaacacccaccgcccatgatgctcatcaagaacacgcctgtgcccggaaatatcaccagcttctcggacgtgcccgtcagcagcttcatcacccagtacagcaccgggcaggtcaccgtggagatggagtgggagctcaagaaggaaaactccaagaggtggaacccagagatccagtacacaaacaactacaacgacccccagtttgtggactttgccccggacagcaccggggaatacagaaccaccagacctatcggaacccgataccttacccgacccctttaa

SEQ ID NO: 791 - DNA, 2175 bp, Artificial Sequence
  Synthetic polynucleotide
atgtcttttgttgatcaccctccagattggttggaagaagttggtgaaggtcttcgcgagtttttgggccttgaagcgggcccaccgaaaccaaaacccaatcagcagcatcaagatcaagcccgtggtcttgtgctgcctggttataactatctcggacccggaaacggtctcgatcgaggagagcctgtcaacagggcagacgaggtcgcgcgagagcacgacatctcgtacaacgagcagcttgaggcgggagacaacccctacctcaagtacaaccacgcggacgccgagtttcaggagaagctcgccgacgacacatcctccgggggaaacctcggaaaggcagtctttcaggccaagaaaagggttctcgaaccttttggcctggttgaagagggtgctaagacggcccctaccggaaagcggatagacgaccactttccaaaaagaaagaaggcccggaccgaagaggactccaagccttccacctcgtcagacgccgaagctggacccagcggatcccagcagctgcaaatcccagcccaaccagcctcaagtttgggagctgatacaatgtctgcgggaggtggcggcccattgggcgacaataaccaaggtgccgatggagtgggcaatgcctcgggagattggcattgcgattccacgtggatgggggacagagtcgtcaccaagtccacccgaacctgggtgctgcccagctacaacaaccaccagtaccgagagatcaaaagcggctccgtcgacggaagcaacgccaacgcctactttggatacagcaccccctgggggtactttgactttaaccgcttccacagccactggagcccccgagactggcaaagactcatcaacaactactggggcttcagaccccggtccctcagagtcaaaatcttcaacattcaagtcaaagaggtcacggtgcaggactccaccaccaccatcgccaacaacctcacctccaccgtccaagtgtttacggacgacgactaccagctgccctacgtcgtcggcaacgggaccgagggatgcctgccggccttccctccgcaggtctttacgctgccgcagtacggttacgcgacgctgaaccgcgacaacacagaaaatcccaccgagaggagcagcttcttctgcctagagtactttcccagcaagatgctgagaacgggcaacaactttgagtttacctacaactttgaggaggtgcccttccactccagcttcgctcccagtcagaacctcttcaagctggccaacccgctagtggaccagtacttgtaccgcttcgtgagcacaaataacactggcggagtccagttcaacaagaacctggccgggagatacgccaacacctacaaaaactggttcccggggcccatgggccgaacccagggctggaacctgggctccggggtcaaccgcgccagtgtcagcgccttcgccacgaccaataggatggagctcgagggcgcgagttaccaggtgcccccgcagccgaacggcatgaccaacaacctccagggcagcaacacctatgccctggagaacactatgatcttcaacagccagccggcgaacccgggcaccaccgccacgtacctcgagggcaacatgctcatcaccagcgagagcgagacgcagccggtgaaccgcgtggcgtacaacgtcggcgggcagatggccaccaacaaccagagctccaccactgcccccgcgaccggcacgtacaacctccaggaaatcgtgcccggcagcgtgtggatggagagggacgtgtacctccaaggacccatctgggccaagatcccagagacgggggcgcactttcacccctctccggccatgggcggattcggactcaaacacccaccgcccatgatgctcatcaagaacacgcctgtgcccggaaatatcaccagcttctcggacgtgcccgtcagcagcttcatcacccagtacagcaccgggcaggtcaccgtggagatggagtgggagctcaagaaggaaaactccaagaggtggaacccagagatccagtacacaaacaactacaacgacccccagtttgtggactttgccccggacagcaccggggaatacagaaccaccagacctatcggaacccgataccttacccgacccctttaa

SEQ ID NO: 792 - DNA, 2175 bp, Artificial Sequence
  Synthetic polynucleotide
atgtcttttgttgatcaccctccagattggttggaagaagttggtgaaggtcttcgcgagtttttgggccttgaagcgggcccaccgaaaccaaaacccaatcagcagcatcaagatcaagcccgtggtcttgtgctgcctggttataactatctcggacccggaaacggtctcgatcgaggagagcctgtcaacagggcagacgaggtcgcgcgagagcacgacatctcgtacaacgagcagcttgaggcgggagacaacccctacctcaagtacaaccacgcggacgccgagtttcaggagaagctcgccgacgacacatccttcgggggaaacctcggaaaggcagtctttcaggccaagaaaagggttctcgaaccttttggcctggttgaagagggtgctaagacggcccctaccggaaagcggatagacgaccactttccaaaaagaaagaaggcccggaccgaagaggactccaagccttccacctcgtcagacgccgaagctggacccagcggatcccagcagctgcaaatcccagcccaaccagcctcaagtttgggagctgatacaatgtctgcgggaggtggcggcccattgggcgacaataaccaaggtgccgatggagtgggcaatgcctcgggagattggcattgcgattccacgtggatgggggacagagtcgtcaccaagtccacccgaacctgggtgctgcccagctacaacaaccaccagtaccgagagatcaaaagcggctccgtcgacggaagcaacgccaacgcctactttggatacagcaccccctgggggtactttgactttaaccgcttccacagccactggagcccccgagactggcaaagactcatcaacaactactggggcttcagaccccggtccctcagagtcaaaatcttcaacattcaagtcaaagaggtcacggtgcaggactccaccaccaccatcgccaacaacctcacctccaccgtccaagtgtttacggacgacgactaccagctgccctacgtcgtcggcaacgggaccgagggatgcctgccggccttccctccgcaggtctttacgctgccgcagtacggttacgcgacactgaaccgcgacaacacagaaaatcccaccgagaggagcagcttcttctgcctagagtactttcccagcaagatgctgagaacgggcaacaactttgagtttacctacaactttgaggaggtgcccttccactccagcttcgctcccagtcagaacctcttcaagctggccaacccgctggtggaccagtacttgtaccgcttcgtgagcacaaataacactggcggagtccagttcaacaagaacctggccgggagatacgccaacacctacaaaaactggttcccggggcccatgggccgaacccagggctggaacctgggctccggggtcaaccgcgccagtgtcagcgccttcgccacgaccaataggatggagctcgagggcgcgagttaccaggtgcccccgcagccgaacggcatgaccaacaacctccagggcagcaacacctatgccctggagaacactatgatcttcaacagccagccggcgaacccgggcaccaccgccacgtacctcgagggcaacatgctcatcaccagcgagagcgagacgcagccggtgaaccgcgtggcgtacaacgtcggcgggcagatggccaccaacaaccagagctccaccactgcccccgcgaccggcacgtacaacctccaggaaatcgtgcccggcagcgtgtggatggagagggacgtgtacctccaaggacccatctgggccaagatcccagagacgggggcgcactttcacccctctccggccatgggcggattcggactcaaacacccaccgcccatgatgctcatcaagagcacgcctgtgcccggaaatatcaccagcttctcggacgtgcccgtcagcagcttcatcacccagtacagcaccgggcaggtcaccgtggagatggagtgggagctcaagaaggaaaactccaagaggtggaacccagagatccagtacacaaacaactacaacgacccccagtttgtggactttgccccggacagcaccggggaatacagaaccaccagacctatcggaacccgataccttacccgacccctttaa

SEQ ID NO: 793 - DNA, 2175 bp, Artificial Sequence
  Synthetic polynucleotide
atgtcttttgttgatcaccctccagattggttggaagaagttggtgaaggtcttcgcgagtttttgggccctgaagcgggcccaccgaaaccaaaacccaatcagcagcatcaagatcaagcccgtggtcttgtgctgcctggttataactatctcggacccggaaacggtctcgatcgaggagagcctgtcaacagggcagacgaggtcgcgcgagagcacgacatctcgtacaacgagcagcttgaggcgggagacaacccctacctcaagtacaaccacgcggacgccgagtttcaggagaagctcgccgacgacacatccttcgggggaaacctcggaaaggcagtctttcaggccaagaaaagggttctcgaaccttttggcctggttgaagagggtgctaagacggcccctaccggaaagcggatagacgaccactttccaaaaagaaagaaggtccggaccgaagaggactccaagccttccacctcgtcagacgccgaagctggacccagcggatcccagcagctgcaaatcccagcccaaccagcctcaagtttgggagctgatacaatgtctgcgggaggtggcggcccattgggcgacaataaccaaggtgccgatggagtgggcaatgcctcgggagattggcattgcgattccacgtggatgggggacagagtcgtcaccaagtccacccgaacctgggtgccgcccagctacaacaaccaccagtaccgagagatcaaaagcggctccgtcgacggaagcaacgccaacgcctactttggatacagcaccccctgggggtactttgactttaaccgcttccacagccactggagcccccgagactggcaaagactcatcaacaactactggggcttcagaccccggtccctcagagtcaaaatcttcaacattcaagtcaaagaggtcacggtgcaggactccaccaccaccatcgccaacaacctcacctccaccgtccaagtgtttacggacgacgactaccagctgccctacgtcgtcggcaacgggaccgagggatgcctgccggccttccctccgcaggtctttacgctgccgcagtacggttacgcgacgctgaaccgcgacaacacagaaaatcccaccgagaggagcagcttcttctgcctagagtactttcccagcaagatgctgagaacgggcaacaactttgagtttacctacaactttgaggaggtgcccttccactccagcttcgctcccagtcagaacctcttcaagctggccaacccgctggtggaccagtacttgtaccgcttcgtgagcacaaataacactggcggagtccagttcaacaagaacctggccgggagatacgccaacacctacaaaaactggttcccggggcccatgggccgaacccagggctggaacctgggctccggggtcaaccgcgccagtgtcagcgccttcgccacgaccaataggatggagctcgagggcgcgagttaccaggtgcccccgcagccgaacggcatgaccaacaacctccagggcagcaacacctatgccctggagaacactatgatcttcaacagccagccggcgaacccgggcaccaccgccacgtacctcgagggcaacatgctcatcaccagcgagagcgagacgcagccggtgaaccgcgtggcgtgcaacgtcggcgggcagatggccaccaacaaccagagctccaccactgcccccgcgaccggcacgtacaacctccaggaaatcgtgcccggcagcgtgtggatggagagggacgtgtacctccaaggacccatctgggccaagatcccagagacgggggcgcactttcacccctctccggccatgggcggattcggactcaaacacccaccgcccatgatgctcatcaagaacacgcctgtgcccggaaatatcaccagcttctcggacgtgcccgtcagcagcttcatcacccagtacagcaccgggcaggtcaccgtggagatggagtgggagctcaagaaggaaaactccaagaggtggaacccagagatccagtacacaaacaactacaacgacccccagtttgtggactttgccccggacagcaccggggaatacagaaccaccagacctattggaacccgataccttacccgacccctttaa

SEQ ID NO: 794 - DNA, 2175 bp, Artificial Sequence
  Synthetic polynucleotide
atgtcttttgttgatcaccctccagattggttggaagaagttggtgaaggtcttcgcgagtttttgggccttgaagcgggcccaccgaaaccaaaacccaatcagcagcatcaagatcaagcccgtggtcttgtgctgcctggttataactatctcggacccggaaacggtctcgatcgaggagagcctgtcaacagggcagacgaggtcgcgcgagagcacgacatctcgtacaacgagcagcttgaggcgggagacaacccctacctcaagtacaaccacgcggacgccgagtttcaggagaagctcgccgacgacacatccttcgggggaaacctcggaaaggcagtctttcaggccaagaaaagggttctcgaaccttttggcctggttgaagagggtgctaagacggcccctaccggaaagcggatagacgaccactttccaaaaagaaagaaggcccggaccgaagaggactccaagccttccacctcgtcagacgccgaagctggacccagcggatcccagcagctgcaaatcccagcccaaccagcctcaagtttgggagctgatacaatgtctgcgggaggtggcggcccattgggcgacaataaccaaggtgccgatggagtgggcaatgcctcgggagattggcattgcgattccacgtggatgggggacagagtcgtcaccaagtccacccgaacctgggtgctgcccagctacaacaaccaccagtaccgagagatcaaaagcggctccgtcgacggaagcaacgccaacgcctactttggatacagcaccccctgggggtactttgactttaaccgcttccacagccactggagcccccgagactggcaaagactcatcaacaactactggggcttcagaccccggtccctcagagtcaaaatcttcaacattcaagtcaaagaggtcacggtgcaggactccaccaccaccatcgccaacaacctcacctccaccgtccaagtgtttacggacgacgactaccagctgccctacgtcgtcggcaacgggaccgagggatgcctgccggccttccctccgcaggtctttacgctgccgcagtacggttacgcgacgctgaaccgcgacaacaccgaaaatcccaccgagaggagcagcttcttctgcctagagtactttcccagcaagatgctgagaacgggcaacaactttgagtttacctacaactttgaggaggtgcccttccactccagcttcgctcccagtcagaacctcttcaagctggccaacccgctggtggaccagtacttgtaccgcttcgtgagcacaaataacactggcggagtccagttcaacaagaacctggccgggagatacgccaacacctacaaaaactggttcccggggcccatgggccgaacccagggctggaacctgggctccggggtcaaccgcgccagtgtcagcgccttcgccacgaccaataggatggagctcgagggcgcgagttaccaggtgcccccgcagccgaacggcatgaccaacaacctccagggcagcaacacctatgccctggagaacactatgatcttcaacagccagccggcgaacccgggcaccaccgccacgtacctcgagggcaacatgctcatcaccagcgagagcgagacgcagccggtgaaccgcgtggcgtacaacgtcggcgggcagatggccaccaacaaccagagctccaccactgcccccgcgaccggcgcgtacaacctccaggaaatcgtgcccggcagcgtgtggatggagagggacgtgtacctccaaggacccatctgggccaagatcccagagacgggggcgcactttcacccctctccggccatgggcggattcggactcaaacacccaccgcccatgatgctcatcaagaacacgcctgtgcccggaaatatcaccagcttctcggacgtgcccgtcagcagcttcatcacccagtacagcaccgggcaggtcaccgtggagatggagtgggagctcaagaaggaaaactccaagaggtggaacccagagatccagtacacaaacaactacaacgacccccagtttgtggactttgccccggacagcaccggggaatacagaaccaccagacctatcggaacccgataccttacccgacccctttaa

SEQ ID NO: 795 - DNA, 2175 bp, Artificial Sequence
  Synthetic polynucleotide
atgtcttttgttgatcaccctccagattggttggaagaagttggtgaaggtcttcgcgagtttttgggccttgaagcgggcccaccgaaaccaaaacccaatcagcagcatcaagatcaagcccgtggtcttgtgctgcctggttataactatctcggacccggaaacggtctcgatcgaggagagcctgtcaacagggcagacggggtcgcgcgagagcacgacatctcgtacaacgagcagcttgaggcgggagacaacccctacctcaagtacaaccacgcggacgccgagtttcaggagaagctcgccgacgacacatccttcgggggaaacctcggaaaggcagtctttcaggccaagaaaagggttctcgaaccttttggcctggttgaagagggtgctaagacggcccctaccggaaagcggatagacgaccactttccaaaaagaaagaaggcccggaccgaagaggactccaagccttccacctcgtcagacgccgaagctggacccagcggatcccagcagctgcaaatcccagcccaaccagcctcaagtttgggagctgatacaatgtctgcgggaggtggcggcccattgggcgacaataaccaaggtgccgatggagtgggcaatgcctcgggagattggcattgcgattccacgtggatgggggacagagtcgtcaccaagtccacccgaacctgggtgctgcccagctacaacaaccaccagtaccgagagatcaaaagcggctccgtcgacggaagcaacgccaacgcctactttggatacagcaccccctgggggtactttgactttaaccgcttccacagccactggagcccccgagactggcaaagactcatcaacaactactggggcttcagaccccggtccctcagagtcaaaatcttcaacattcaagtcaaagaggtcacggtgcaggactccaccaccaccatcgccaacaacctcacctccaccgtccaagcgtttacggacgacgactaccagctgccctacgtcgtcggcaacgggaccgagggatgcctgccggccttccctccgcaggtctttacgctgccgcagtacggttacgcgacgctgaaccgcgacaacacagaaaatcccaccgagaggagcagcttcttctgcctagagtactttcccagcaagatgctgagaacgggcaacaactttgagtttacctacaactttgaggaggtgcccttccactccagcttcgctcccagtcagaacctcttcaagctggccaacccgctggtggaccagtacttgtaccgcttcgtgagcacaaataacactggcggagtccagttcaacaagaacctggccgggagatacgccaacacctacaaaaactggttcccggggcccatgggccgaacccagggctggaacctgggctccggggtcaaccgcgccagtgtcagcgccttcgccacgaccaataggatggagctcgagggcgcgagttaccaggtgcccccgcagccgaacggcatgaccaacaacctccagggcagcaacacctatgccctggagaacactatgatcttcaacagccagccggcgaacccgggcaccaccgccacgtacctcgagggcaacatgctcatcaccagcgagagcgagacgcagccggtgaaccgcgtggcgtacaacgtcggcgggcagatggccaccaacaaccagagctccaccactgcccccgcgaccggcacgtacaacctccaggaaatcgtgcccggcagcgtgtggatggagagggacgtgtacctccaaggacccatctgggccaagatcccagagacgggggcgcactttcacccctctccggccatgggcggattcggactcaaacacccaccgcccatgatgctcatcaagaacacgcctgtgcccggaaatatcaccagcttctcggacgtgcccgtcagcagcttcatcacccagtacagcaccgggcaggtcaccgtggagatggagtgggagctcaagaaggaaaactccaagaggtggaacccagagatccagtacacaaacaactacaacgacccccagtttgtggactttgccccggacagcaccggggaatacagaaccaccagacctatcggaacccgataccttacccgacccctttaa

SEQ ID NO: 796 - DNA, 2175 bp, Artificial Sequence
  Synthetic polynucleotide
atgtcttttgttgatcaccctccagattggttggaagaagttggtgaaggtcttcgcgagtttttgggccttgaagcgggcccaccgaaaccaaaacccaatcagcagcatcaagatcaagcccgtggtcttgtgctgcctggttataactatctcggacccggaaacggtctcgatcgaggagagcctgtcaacagggcagacgaggtcgcgcgagagcacgacatctcgtacaacgagcagcttgaggcgggagacaacccctacctcaagtacaaccacgcggacgccgagtttcaggagaagctcgccgacgacacatccttcgggggaaacctcggaaaggcagtctttcaggccaagaaaagggttctcgaaccttttggcctggttgaagagggtgctaagacggcccctaccggaaagcggatagacgaccactttccaaaaagaaagaaggcccggaccgaagaggactccaagccttccacctcgtcagacgccgaagctggacccagcggatcccagcagctgcaaatcccagcccaaccagcctcaagtttgggagctgatacaatgtctgcgggaggtggcggcccattgggcgacaataaccaaggtgccgatggagtgggcaatgcctcgggagattggcattgcgattccacgtggatgggggacagagtcgtcaccaagtccacccgaacctgggtgctgcccagctacaacaaccaccagtaccgagagatcaaaagcggctccgtcgacggaagcaacgccaacgcctactttggatacagcaccccctgggggtactttgactttaaccgcttccacagccactggagcccccgagactggcaaagactcatcaacaactactggggcttcagaccccggtccctcagagtcaaaatcttcaacattcaagtcaaagaggtcacggtgcaggactccaccaccaccatcgccaacaacctcacctccaccgtccaagtgtttacggacgacgactaccagctgccctacgtcgtcggcaacgggaccgagggatgcctgccggccttccctccgcaggtctttacgctgccgcagtacggttacgcgacgctgaaccgcgacaacacagaaaatcccaccgagaggagcagcttcttctgcctagagtactttcccagcaagatgctgagaacgggcaacaactttgagtttacctacaactttgaggaggtgcccttccactccagcttcgctcccagtcagaacctcttcaagctggccaacccgctggtggaccagtacttgtaccgcttcgtgagcacaaataacactggcggagtccagttcaacaagaacctggccgggagatacgccaacacctacaaaaactggttcccggggcccatgggccgaacccagggctggaacctgggctccggggtcaaccgcgccagtgtcagcgccttcgccacgaccaataggatggagctcgagggcgcgagttactaggtgcccccgcagccgaacggcatgaccaacaacctccagggcagcaacacctatgccctggagaacactatgatcttcaacagccagccggcgaacccgggcaccaccgccacgtacctcgagggcaacatgctcatcaccagcgagagcgagacgcagccggtgaaccgcgtggcgtacaacgtcggcgggcagatggccaccaacaaccagagctccaccactgcccccgcgaccggcacgtacaacctccaggaaatcgtgcccggcagcgtgtggatggagggggacgtgtacctccaaggacccatctgggccaagatcccagagacgggggcgcactttcacccctctccggccatgggcggattcggactcaagcacccaccgcccatgatgctcatcaagaacacgcctgtgcccggaaatatcaccagcttctcggacgtgcccgtcagcagcttcatcacccagtacagcaccgggcaggtcaccgtggagatggagtgggagctcaagaaggaaaactccaagaggtggaacccagagatccagtacacaaacaactacaacgacccccagtttgtggactttgccccggacagcaccggggaatacagaaccaccagacctatcggaacccgataccttacccgacccctttaa

SEQ ID NO: 797 - DNA, 2175 bp, Artificial Sequence
  Synthetic polynucleotide
atgtcttttgttgatcaccctccagattggttggaagaagttggtgaaggtcttcgcgagtttttgggccttgaagcgggcccaccgaaaccaaaacccaatcagcagcatcaagatcaagcccgtggtcttgtgctgcctggttataactatctcggacccggaaacggtctcgatcgaggagagcctgtcaacagggcagacgaggtcgcgcgagagcacgacatctcgtacaacgagcagcttgaggcgggagacaacccctacctcaagtacaaccacgcggacgccgagtttcaggagaagctcgccgacgacacatccttcgggggaaacctcggaaaggcagtctttcaggccaagaaaagggttctcgaaccttttggcctggttgaagagggtgctaagacggcccctaccggaaagcggatagacgaccactttccaaaaagaaagaaggtccggaccgaagaggactccaagccttccacctcgtcagacgccgaagctggacccagcggatcccagcagctgcaaatcccagcccaaccagcctcaagtttgggagctgatacaatgtctgcgggaggtggcggcccattgggcgacaataaccaaggtgccgatggagtgggcaatgcctcgggagattggcattgcgattccacgtggatgggggacagagtcgtcaccaagtccacccgaacctgggtgctgcccagctacaacaaccaccagtaccgagagatcaaaagcggctccgtcgacggaagcaacgccaacgcctactttggatacagcaccccctgggggtactttgactttaaccgcttccacagccactggagcccccgagactggcaaagactcatcaacaactactggggcttcagaccccggtccctcagagtcaaaatcttcaacattcaagtcaaagaggtcacggtgcaggactccaccaccaccatcgccaacaacctcacctccaccgtccaagtgtttacggacgacgactaccagctgccctacgtcgtcggcaacgggaccgagggatgcctgccggccttccctccgcaggtctttacgctgccgcagtacggttacgcgacgctgaaccgcgacaacacagaaaatcccaccgagaggagcagcttcttctgcctagagtactttcccagcaagatgctgagaacgggcaacaactttgagtttacctacaactttgaggaggtgcccttccactccagcttcgctcccagtcagaacctcttcaagctggccaacccgctggtggaccagtacttgtaccgcttcgtgagcacaaataacactggcggagtccagttcaacaagaacctggccgggagatacgccaacacctacaaaaactggttcccggggcccatgggccgaacccagggctggaacctgggctccggggtcaaccgcgccagtgtcagcgccttcgccacgaccaataggatggagctcgagggcgcgagttaccaggtgcccccgcagccgaacggcatgaccaacaacctccagggcagcaacacctatgccctggagaacactatgatcttcaacagccagccggcgaacccgggcaccaccgccacgtacctcgagggcaacatgctcatcaccagcgagagcgagacgcagccggtgaaccgcgtggcgtacaacgtcggcgggcagatggccaccaacaaccagagctccaccactgcccccgcgaccggcacgtacaacctccaggaaatcgtgcccggcagcgtgtggatggagagggacgtgtacctccaaggacccatctgggccaagatcccagagacgggggcgcactttcacccctctccggccatgggcggattcggactcaaacacccaccgcccatgatgctcatcaagaacacgcctgtgcccggaaatatcaccagcttctcggacgtgcccgtcagcagcttcatcacccagtacagcaccgggcaggtcaccgtggagatggagtgggagctcaagaaggaaaactccgagaggtggaacccagagatccagtacacaaacaactacaacgacccccagtttgtggactttgccccggacagcaccggggaatacagaaccaccagacctattggaacccgataccttacccgacccctttaa

SEQ ID NO: 798 - DNA, 2175 bp, Artificial Sequence
  Synthetic polynucleotide
atgtcttttgttgatcaccctccagattggttggaagaagttggtgaaggtcttcgcgagtttttgggccttgaagcgggcccaccgaaaccaaaacccaatcagcagcatcaagatcaagcccgtggtcttgtgctgcctggttataactatctcggacccggaaacggtctcgatcgaggagagcctgtcaacagggcagacgaggtcgcgcgagagcacgacatctcgtacagcgagcagcttgaggcgggagacaacccctacctcaagtacaaccacgcggacgccgagtttcaggagaagctcgccgacgacacatccttcgggggaaacctcggaaaggcagtctttcaggccaagaaaagggttctcgaaccttttggcctggttgaagagggtgctaagacggcccctaccggaaagcggatagacgaccactttccaaaaagaaagaaggcccggaccgaagaggactccaagccttccacctcgtcagacgccgaagctggacccagcggatcccagcagctgcaaatcccagcccaaccagcctcaagtttgggagctgatacaatgtctgcgggaggtggcggcccattgggcgacaataaccaaggtgccgatggagtgggcaatgcctcgggagattggcattgcgattccacgtggatgggggacagagtcgtcaccaagtccacccgaacctgggtgctgcccagctacaacaaccaccagtaccgagagatcaaaagcggctccgtcgacggaagcaacgccaacgcctactttggatacagcaccccctgggggtactttgactttaaccgcttccacagccactggagcccccgagactggcaaagactcatcaacaactactggggcttcagaccccggtccctcagagtcaaaatcttcaacattcaagtcaaagaggtcacggtgcaggactccaccaccaccatcgccaacaacctcacctccaccgtccaagtgtttacggacgacgactaccagctgccctacgtcgtcggcaacgggaccgagggatgcctgccggccttccctccgcaggtctttacgctgccgcagtacggttacgcgacgctgaaccgcgacaacacagaaaatcccaccgagaggagcagcttcttctgcctagagtactttcccagcaagatgctgagaacgggcaacaactttgagtttacctacaactttgaggaggtgcccttccactccagcttcgctcccagtcagaacctcttcaagctggccaacccgctggtggaccagtacttgtaccgcttcgtgagcacaaataacactggcggagtccagttcaacaagaacctggccgggagatacgccaacacctacaaaaactggttcccggggcccatgggccgaacccagggctggaacctgggctccggggtcaaccgcgccagtgtcagcgccttcgccacgaccaataggatggagctcgagggcgcgagttaccaggtgcccccgcagccgaacggcatgaccaacaacctccagggcagcaacacctatgccctggagaacactatgatcttcaacagccagccggcgaacccgggcaccaccgccacgtacctcgagggcaacatgctcatcaccagcgagagcgagacgcagccggtgaaccgcgtggcgtacaacgtcggcgggcagatggccaccaacaaccagagctccaccactgcccccgcgaccggcacgtacaacctccaggaaatcgtgcccggcagcgtgtggatggagagggacgtgtacctccaaggacccatctgggccaagatcccagagacgggggcgcactttcacccctctccggccatgggcggattcggactcaaacacccaccgcccatgatgctcatcaagaacacgcctgtgcccggaaatatcaccagcttctcggacgtgcccgtcagcagcttcatcacccagtacagcaccgggcaggtcaccgtggagatggagtgggagctcaagaaggaaaactccaagaggtggaacccagagatccagtacacaaacaactacaacgacccccagtttgtggactttgccccggacagcaccggggaatacagaaccgccagacctatcggaacccgataccttacccgacccctttaa

SEQ ID NO: 799 - DNA, 2175 bp, Artificial Sequence
  Synthetic polynucleotide
atgtcttttgttgatcaccctccagattggttggaagaagttggtgaaggtcttcgcgagtttttgggccctgaagcgggcccaccgaaaccaaaacccaatcagcagcatcaagatcaagcccgtggtcttgtgctgcctggttataactatctcggacccggaaacggtctcgatcgaggagagcctgtcaacagggcagacgaggtcgcgcgagagcacgacatctcgtacaacgagcagcttgaggcgggagacaacccctacctcaagtacaaccacgcggacgccgagtttcaggagaagctcgccgacgacacatccttcgggggaaacctcggaaaggcagtctttcaggccaagaaaagggttctcgaaccttttggcctggttgaagagggtgctaagacggcccctaccggaaagcggatagacgaccactttccaaaaagaaagaaggcccggaccgaagaggactccaagccttccacctcgtcagacgccgaagctggacccagcggatcccagcagctgcaaatcccagcccaaccagcctcaagtttgggagctgatacaatgtctgcgggaggtggcggcccattgggcgacaataaccaaggtgccgatggagtgggcaatgcctcgggagattggcattgcgattccacgtggatgggggacagagtcgtcaccaagtccacccgaacctgggtgctgcccagctacaacaaccaccagtaccgagagatcaaaagcggctccgtcgacggaagcaacgccaacgcctactttggatacagcaccccctgggggtactttgactttaaccgcttccacagccactggagcccccgagactggcaaagactcatcaacaactactggggcttcagaccccggtccctcagagtcaaaatcttcaacattcaagtcaaagaggtcacggtgcaggactccaccaccaccatcgccaacaacctcacctccaccgtccaagtgtttacggacgacgactaccagctgccctacgtcgtcggcaacgggaccgagggatgcctgccggccttccctccgcaggtctttacgctgccgcagtacggttacgcgacgctgaaccgcgacaacacagaaaatcccaccgagaggagcagcttcttctgcctagagtactttcccagcaagatgctgagaacgggcaacaactttgagtttacctacaactttgaggaggtgcccttccactccagcttcgctcccagtcagaacctcttcaagctggccaacccgctggtggaccagtacttgtaccgcttcgtgagcacaaataacactggcggagtccagttcaacaagaacctggccgggagatacgccaacacctacaaaaactggttcccggggcccatgggccgaacccagggctggaacctgggctccggggtcaaccgcgccagtgtcagcgccttcgccacgaccaataggatggagctcgagggcgcgagttaccaggtgcccccgcagccgaacggcatgaccaacaacctccagggcagcaacacctatgccctggagaacactatgatcttcaacagccagccggcgaacccgggcaccaccgccacgtacctcgagggcaacatgctcatcaccagcgagagcgagacgcagccggtgaaccgcgtggcgtacaacgtcggcgggcagatgaccaccaacaaccagagctccaccactgcccccgcgaccggcacgtacaacctccaggaaatcgtgcccggcagcgtgtggatggagagggacgtgtacccccaaggacccatctgggccaagatcccagagacgggggcgcactttcacccctctccggccatgggcggattcggactcaaacacccaccgcccatgatgctcatcaagaacacgcctgtgcccggaaatatcaccagcttctcggacgtgcccgtcagcagcttcatcacccagtacagcaccgggcaggtcaccgtggagatggagtgggagctcaagaaggaaaactccaagaggtggaacccagagatccagtacacaaacaactacaacgacccccagtttgtggactttgccccggacagcaccggggaatacaggaccaccagacctatcggaacccgataccttacccgacccctttaa

SEQ ID NO: 800 - DNA, 2175 bp, Artificial Sequence
  Synthetic polynucleotide
atgtcttttgttgatcaccctccagattggttggaagaagttggtgaaggtcttcgcgagtttttgggccttgaagcgggcccaccgaaaccaaaacccaatcagcagcatcaagatcaagcccgtggtcttgtgctgcctggttataactatctcggacccggaaacggtctcgatcgaggagagcctgtcaacagggcagacgaggtcgcgcgagagcacgacatctcgtacaacgagcagcttgaggcgggagacaacccctacctcaagtacaaccacgcggacgccgagtttcaggagaagctcgccgacgacacatccttcgggggaaacctcggaaaggcagtctttcaggccaagaaaagggttctcgaaccttttggcctggttgaagagggtgctaagacggcccctaccggaaagcggatagacgaccactttccaaaaagaaagaaggcccggaccgaagaggactccaagccttccacctcgtcagacgccgaagctggacccagcggatcccagcagctgcaaatcccagcccaaccagcctcaagtttgggagctgatacaatgtctgcgggaggtggcggcccattgggcgacaataaccaaggtgccgatggagtgggcaatgcctcgggagattggcattgcgattccacgtggatgggggacagagtcgtcaccaagtccacccgaacctgggtgctgcccagctacaacaaccaccagtaccgagagatcaaaagcggctccgtcgacggaagcaacgccaacgcctactttggatacagcaccccctgggggtactttgactttaaccgcttccacagccactggagcccccgagactggcaaagactcatcaacaactactggggcttcagaccccggtccctcagagtcaaaatcttcaacattcaagtcaaagaggtcacggtgcaggactccaccaccaccatcgccaacaacctcacctccaccgtccaagtgtttacggacgacgactaccagctgccctacgtcgtcggcaacgggaccgagggatgcctgccggccttccctccgcaggtctttacgctgccgcagtacggttacgcgacgctgaaccgcgacaacacagaaaatcccaccgagaggagcagcttcctctgcctagagtactttcccagcaagatgctgagaacgggcaacaactttgagtttacctacaactttgaggaggtgcccttccactccagcttcgctcccagtcagaacctcttcaagctggccaacccgctggtggaccagtacttgtaccgcttcgtgagcacaaataacactggcggagtccagttcaacaagaacctggccgggagatacgccaacacctacaaaaactggttcccggggcccatgggccgaacccagggctggaacctgggctccggggtcaaccgcgccagtgtcagcgccttcgccacgaccaataggatggagctcgagggcgcgagttaccaggtgcccccgcagccgaacggcatgaccaacaacctccagggcagcaacacctatgccctggagaacactatgatcttcaacagccagccggcgaacccgggcaccaccgccacgtacctcgagggcaacatgctcatcaccagcgagagcgagacgcagccggtgaaccgcgtggcgtacaacgtcggcgggcagatggccaccaacaaccagagctccaccactgcccccgcgaccggcacgtacaacctccaggaaatcgtgcccggcagcgtgtggatgaagagggacgtgtacctccaaggacccatctgggccaagatcccagagacgggggcgcactttcacccctctccggccatgggcggattcggactcaaacacccaccgcccatgatgctcatcaagaacacgcctgtgcccggaaatatcaccagcttctcggacgtgcccgtcagcagcttcatcacccagtacagcaccgggcaggtcaccgtggagatggagtgggagctcaagaaggaaaactccaagaggtggaacccagagatccagtacacaaacaactacaacgacccccagtttgtggactttgccccggacagcaccggggaatacagaaccaccagacctatcggaacccgataccttacccgacccctttaa

SEQ ID NO: 801 - DNA, 2175 bp, Artificial Sequence
  Synthetic polynucleotide
atgtcttttgttgatcaccctccagattggttggaagaagttggtgaaggtcttcgcgagtttttgggccttgaggcgggcccaccgaaaccaaaacccaatcagcagcatcaagatcaagcccgtggtcttgtgctgcctggttataactatctcggacccggaaacggtctcgatcgaggagagcctgtcaacagggcagacgaggtcgcgcgagagcacgacatctcgtacaacgagcagcttgaggcgggagacaacccctacctcaagtacaaccacgcggacgccgagtttcaggagaagctcgccgacgacacatccttcgggggaaacctcggaaaggcagtctttcaggccaagaaaagggttctcgaaccttttggcctggttgaagagggtgctaagacggcccctaccggaaagcggatagacgaccactttccaaaaagaaagaaggcccggaccgaagaggactccaagccttccaccccgtcagacgccgaagctggacccagcggatcccagcagctgcaaatcccagcccaaccagcctcaagtttgggagctgatacaatgtctgcgggaggtggcggcccattgggcgacaataaccaaggtgccgatggagtgggcaatgcctcgggagattggcattgcgattccacgtggatgggggacagagtcgtcaccaagtccacccgaacctgggtgctgcccagctacaacaaccaccagtaccgagagatcaaaagcggctccgtcgacggaagcaacgccaacgcctactttggatacagcaccccctgggggtactttgactttaaccgcttccacagccactggagcccccgagactggcaaagactcatcaacaactactggggcttcagaccccggtccctcagagtcaaaatcttcaacattcaagtcaaagaggtcacggtgcaggactccaccaccaccatcgccaacaacctcacctccaccgtccaagtgtttacggacgacgactaccagctgccctacgtcgtcggcaacgggaccgagggatgcctgccggccttccctccgcaggtctttacgctgccgcagtacggttacgcgacgctgaaccgcgacaacacagaaaatcccaccgagaggagcagcttcttctgcctagagtactttcccagcaagatgctgagaacgggcaacaactttgagtttacctacaactttgaggaggtgcccttccactccagcttcgctcccagtcagaacctcttcaagctggccaacccgctggtggaccagtacttgtaccgcttcgtgagcacaaataacactggcggagtccagttcaacaagaacctggccgggagatacgccaacacctacaaaaactggttcccggggcccatgggccgaacccagggctggaacctgggctccggggtcaaccgcgccagtgtcagcgccttcgccacgaccaataggatggagctcgagggcgcgagttaccaggtgcccccgcagccgaacggcatgaccaacaacctccagggcagcaacacctatgccctggagaacactatgatcttcaacagccagccggcgaacccgggcaccaccgccacgtacctcgagggcaacatgctcatcaccagcgagagcgagacgcagccggtgaaccgcgtggcgtacaacgtcggcgggcagatggccaccaacaaccagagctccaccactgcccccgcgaccggcacgtacaacctccaggaaatcgtgcccggcagcgtgtggatggagagggacgtgtacctccaaggacccatctgggccaagatcccagagacgggggcgcactttcacccctctccggccatgggcggattcggactcaaacacccaccgcccatgatgctcatcaagaacacgcctgtgcccggaaatatcaccagcttctcggacgtgcccgtcagcagcttcatcacccagtacagcaccgggcaggtcaccgtggagatggagtgggagctcaagaaggaaaactccaagaggtggaacccagagatccagtacacaaacaactacaacgacccccagtttgtggactttgccccggacagcaccggggaatacagaaccaccagacctatcggaacccgataccttacccgacccctttaa

SEQ ID NO: 802 - DNA, 2175 bp, Artificial Sequence
  Synthetic polynucleotide
atgtcttttgttgatcaccctccagattggttggaagaagttggtgaaggtcttcgcgagtttttgggccttgaagcgggcccaccgaaaccaaaacccaatcagcagcatcaagatcaagcccgtggtcttgtgctgcctggttataactatctcggacccggaaacggtctcgatcgaggagagcctgtcaacagggcagacgaggtcgcgcgagagcacgacatctcgtacaacgagcagcttgaggcgggagacaacccctacctcaagtacaaccacgcggacgccgagtttcaggagaagctcgccgacgacacatccttcgggggaaacctcggaaaggcagtctttcaggccaagaaaagggttctcgaaccttttggcctggttgaagagggtgctaagacggcccctaccggaaagcggatagacgaccactttccaaaaagaaagaaggcccggaccgaagaggactccaagccttccacctcgtcagacgccgaagctggacccagcggatcccagcagctgcaaatcccagcccaaccagcctcaagtttgggagctgatacaatgtctgcgggaggtggcggcccattgggcgacaataaccaaggtgccgatggagtgggcaatgcctcgggagattggcattgcgattccacgtggatgggggacagagtcgtcaccaagtccacccgaacctgggtgctgcccagctacaacaaccaccagtaccgagagatcaaaagcggctccgtcgacggaagcaacgccaacgcctactttggatacagcaccccctgggggtactttgactttaaccgcttccacagccactggagcccccgagactggcaaagactcatcaacaactactggggcttcagaccccggtccctcagagtcaaaatcttcaacattcaagtcaaagaggtcacggtgcaggactccaccaccaccatcgccaacaacctcacctccaccgtccaagtgtttacggacgacgactaccagctgccctacgtcgtcggcaacgggaccgagggatgcctgccggccttccctccgcaggtctttacgctgccgcagtacggttacgcgacgctgaaccgcgacaacacagaaaatcccaccgagaggagcagcttcttctgcctagagtactttcccagcaagatgctgagaacgggcaacaactttgagtttacctacaactttgaggaggtgcccttccactccagcttcgctcccagtcagaacctcttcaagctggccaacccgctggtggaccagtacttgtaccgcttcgtgagcacaaataacactggcggagtccagttcaacaagaacctggccgggagatacgccaacacccacaaaaactggttcccggggcccatgggccgaacccagggctggaacctgggctccggggtcaaccgcgccagtgtcagcgccttcgccacgaccaataggatggagctcgagggcgcgagttaccaggtgcccccgcagtcgaacggcatgaccaacaacctccggggcagcaacacctatgccctggagaacactatgatcttcaacagccagccggcgaacccgggcaccaccgccacgtacctcgagggcaacatgctcatcaccagcgagagcgagacgcagccggtgaaccgcgtggcgtacaacgtcggcgggcagatggccaccaacaaccagagctccaccactgcccccgcgaccggcacgtacaacctccaggaaatcgtgcccggcagcgtgtggatggagagggacgtgtacctccaaggacccatctgggccaagatcccagagacgggggcgcactttcacccctctccggccatgggcggattcggactcaaacacccaccgcccatgatgctcatcaagaacacgcctgtgcccggaaatatcaccagcttctcggacgtgcccgtcagcagcttcatcacccagtacagcaccgggcaggtcaccgtggagatggagtgggagctcaagaaggaaaactccaagaggtggaacccagagatccagtacacaaacaactacaacgacccccagtttgtggactttgccccggacagcaccggggaatacagaaccaccagacctatcggaacccgataccttacccgacccctttaa

SEQ ID NO: 803 - DNA, 2175 bp, Artificial Sequence
  Synthetic polynucleotide
atgtcttttgttgatcaccctccagattggttggaagaagttggtgaaggtcttcgcgagtttttgggccttgaagcgggcccaccgaaaccaaaacccaatcagcagcatcaagatcaagcccgtggtcttgtgctgcctggttataactatctcggacccggaaacggtctcgatcgaggagagcctgtcaacagggcagacgaggtcgcgcgagagcacgacatctcgtacaacgagcagcttgaggcgggagacaacccctacctcaagtacaaccacgcggacgccgagtttcaggagaagctcgccgacgacacatccttcgggggaaacctcggaaaggcagtctttcaggccaagaaaagggttctcgaaccttttggcctggttgaagagggtgctaagacggcccctaccggaaagcggatagacgaccactttccaaaaagaaagaaggcccggaccgaagaggactccaagccttccacctcgtcagacgccgaagctggacccagcggatcccagcagctgcaaatcccagcccaaccagcctcaagtttgggagctgatacaatgtctgcgggaggtggcggcccattgggcgacaataaccaaggtgccgatggagtgggcaatgcctcgggagattggcattgcgattccacgtggatgggggacagagtcgtcaccaagtccacccgaacctgggtgctgcccagctacaacaaccaccagtaccgagagatcaaaagcggctccgtcgacggaagcaacgccaacgcctactttggatacagcaccccctgggggtactttgactttaaccgcttccacagccactggagcccccgagactggcaaagactcatcaacaactactggggcttcagaccccggtccctcagagtcaaaatcttcaacattcaagtcaaagaggtcacggtgcaggactccaccaccaccatcgccaacaacctcacctccaccgtccaagtgtttacggacgacgactaccagctgccctacgtcgtcggcaacgggaccgagggatgcctgccggccttccctccgcaggtctttacgctgccgcagtacggttacgcgacgctgaaccgcgacaacacagaaaatcccaccgagaggagcagcttcttctgcctagagtactttcccagcaagatgctgagaacgggcaacaactttgagtttacctacaactttgaggaggtgcccttccactccagcttcgctcccagtcagaacctcttcaagctggccaacccgctggtggaccagtacttgtaccgcttcgtgagcacaaataacactggcggagtccagttcaacaagaacctggccgggagatacgccaacacctacaaaaactggttcccggggcccatgggccgaacccagggctggaacctgggctccggggtcaaccgcgccagtgtcagcgccttcgccacgaccaataggatggagctcgagggcgcgagttaccaggtgcccccgcagccgaacggcatgaccaacaacctccagggcagcaacacctatgccctggagaacactatgatcttcaacagccagccggcgaacccgggcaccaccgccacgtacctcgagggcaacatgctcatcaccagcgagagcgagacgcagccggtgaaccgcgtggcgtacagcgtcggcgggcagatggccaccaacaaccagagctccaccactgcccccacgaccggcacgtacaacctccaggaaatcgtgcccggcagcgtgtggatggagagggacgtgtacctccaaggacccatctgggccaagatcccagagacgggggcgcactttcacccctctccggccatgggcggattcagactcaaacacccaccgcccatgatgctcatcaagaacacgcctgtgcccggaaatatcaccagcttctcggacgtgcccgtcagcagcttcatcacccagtacagcaccgggcaggtcaccgtggagatggagtgggagctcaagaaggaaaactccaagaggtggaacccagagatccagtacacaaacaactacaacgacccccagtttgtggactttgccccggacagcaccggggaatacagaaccaccagacctatcggaacccgataccttacccgacccctttaa

SEQ ID NO: 804 - DNA, 2175 bp, Artificial Sequence
  Synthetic polynucleotide
atgtcttttgttgatcaccctccagattggttggaagaagttggtgaaggtcttcgcgagtttttgggccttgaagcgggcccaccgaaaccaaaacccaatcagcagcatcaagatcaagcccgtggtcttgtgctgcctggttataactatctcggacccggaaacggtctcgatcgaggagagcctgtcaacagggcagacgaggtcgcgcgagagcacgacatctcgtacaacgagcagcttgaggcgggagacaacccctacctcaagtacaaccacgcggacgccgagtttcaggagaagctcgccgacgacacatccttcgggggaaacctcggaaaggcagtctttcaggccaagaaaagggttctcgaaccttttggcctggttgaagagggtgctaagacggcccctaccggaaagcggatagacgaccactttccaaaaagaaagaaggcccggaccgaagaggactccaagccttccacctcgtcagacgccgaagctggacccagcggatcccagcagctgcaaatcccagcccaaccagcctcaagtttgggagctgatacaatgtctgcgggaggtggcggcccattgggcgacaataaccaaggtgccgatggagtgggcaatgcctcgggagattggcattgcgattccacgtggatgggggacagagtcgtcaccaagtccacccgaacctgggtgctgcccagctacaacaaccaccagtaccgagagatcaaaagcggctccgtcgacggaagcaacgccaacgcctactttggatacagcaccccctgggggtactttgactttaaccgcttccacagccactggagcccccgagactggcaaagactcatcaacaactactggggcttcagaccccggtccctcagagtcaaaatcttcaacattcaagtcaaagaggtcacggtgcaggactccaccaccaccatcgccaacaacctcacctccaccgtccaagtgtttacggacgacgactaccagctgccctacgtcgtcggcaacgggaccgagggatgcctgccggccttccctccgcaggtctttacgctgccgcagtacggttacgcgacgctgaaccgcgacaacacagaaaatcccaccgagaggagcagcttcttctgcctagagtactttcccagcaagatgctgagaacgggcaacaactttgagtttacctacaactttgaggaggtgcccttccactccagcttcgctcccagtcagaacctcttcaagctggccaacccgctggtggaccagtacttgtaccgcttcgtgagcacaaataacactggcggagtccagttcaacaagaacctggccgggagatacgccaacacctacaaaaactggttcccggggcccatgggccgaacccagggctggaacctgggctccggggtcaaccgcgccagtgtcagcgccttcgccgcgaccaataggatggagctcgagggcgcgagttaccaggtgcccccgcagccgaacggcatgaccaacaacctccagggcagcaacacctatgccctggagaacactatgatcttcaacagccagccggcgaacccgggcaccaccgccacgtacctcgagggcaacatgctcatcaccagcgagagcgagacgcagccggtgaaccgcgtggcgtacaacgtcggcgggcagatggccaccaacaaccagagctccaccactgcccccgcgaccggcacgtacaacctccaggaaatcgtgcccggcggcgtgtggatggagagggacgtgtacctccaaggacccatctgggccaagatcccagagacgggggcgcactttcacccctctccggccatgggcggattcggactcaaacacccaccgcccatgatgctcatcaagaacacgcctgtgcccggaaataccaccagcttctcggacgtgcccgtcagcagcttcatcacccagtacagcaccgggcaggtcaccgtggagatggagtgggagctcaagaaggaaaactccaagaggtggaacccagagatccagtacacaaacaactacaacgacccccagtttgtggactttgccccggacagcaccggggaatacagaaccaccagacctatcggaacccgataccttacccgacccctttaa

SEQ ID NO: 805 - DNA, 2175 bp, Artificial Sequence
  Synthetic polynucleotide
atgtcttttgttgatcaccctccagattggttggaagaagttggtgaaggtcttcgcgagtttttgggccttgaagcgggcccaccgaaaccaaaacccaatcagcagcatcaagatcaagcccgtggtcttgtgctgcctggttataactatctcggacccggaaacggtctcgatcgaggagagcctgtcaacagggcagacgaggtcgcgcgagagcacgacatctcgtacaacgagcagcttgaggcgggagacaacccctacctcaagtacaaccacgcggacgccgagtttcaggagaagctcgccgacgacacatccttcgggggaaacctcggaaaggtagtctttcaggccaagaaaagggttctcgaaccttttggcctggttgaagagggtgctaagacggcccctaccggaaagcggatagacgaccactttccaaaaagaaagaaggcccggaccgaagaggactccaagccttccacctcgtcagacgccgaagctggacccagcggatcccagcagctgcaaatcccagcccaaccagcctcaagtttgggagctgatacaatgtctgcgggaggtggcggcccattgggcggcaataaccaaggtgccgatggagtgggcaatgcctcgggagattggcattgcgattccacgtggatgggggacagagtcgtcaccaagtccacccgaacctgggtgctgcccagctacaacaaccaccagtaccgagagatcaaaagcggctccgtcgacggaagcaacgccaacgcctactttggatacagcaccccctgggggtactttgactttaaccgcttccacagccactggggcccccgagactggcaaagactcatcaacaactactggggcttcagaccccggtccctcagagtcaaaatcttcaacattcaagtcaaagaggtcacggtgcaggactccaccaccaccatcgccaacaacctcacctccaccgtccaagtgtttacggacgacgactaccagctgccctacgtcgtcggcaacgggaccgagggatgcctgccggccttccctccgcaggtctttacgctgccgcagtacggttacgcgacgctgaaccgcgacaacacagaaaatcccaccgagaggagcagcttcttctgcctagagtactttcccagcaagatgctgagaacgggcaacaactttgagtttacctacaactttgaggaggtgcccttccactccagcttcgctcccagtcagaacctcttcaagctggccaacccgctggtggaccagtacttgtaccgcttcgtgagcacaaataacactggcggagtccagttcaacaagaacctggccgggagatacgccaacacctacaaaaactggttcccggggcccatgggccgaacccagggctggaacctgggctccggggtcaaccgcgccagtgtcagcgccctcgccacgaccaataggatggagctcgagggcgcgagttaccaggtgcccccgcagccgaacggcatgaccaacaacctccagggcagcaacacctatgccctggagaacactatgatcttcaacagccagccggcgaacccgggcaccaccgccacgtacctcgagggcaacatgctcatcaccagcgagagcgagacgcagccggtgaaccgcgtggcgtacaacgtcggcgggcagatggccaccaacaaccagagctccaccactgcccccgcgaccggcacgtacaacctccaggaaatcgtgcccggcagcgtgtggatggagagggacgtgtacctccaaggacccatctgggccaagatcccagagacgggggcgcactttcacccctctccggccatgggcggattcggactcaaacacccaccgcccatgatgctcatcaagaacacgcctgtgcccggaaatatcaccagcttctcggacgtgcccgtcagcagcttcatcacccagtacagcaccgggcaggtcaccgtggagatggagtgggagctcaagaaggaaaactccaagaggtggaacccagagatccagtacacaaacaactacaacgacccccagtttgtggactttgccccggacagcaccggggaatacagaaccaccagacctatcggaacccgataccttacccgacccctttaa

SEQ ID NO: 806 - DNA, 2175 bp, Artificial Sequence
  Synthetic polynucleotide
atgtcttttgttgatcaccctccagattggttggaagaagttggtgaaggtcttcgcgagtttttgggccttgaagcgggcccaccgaaaccaaaacccaatcagcagcatcaagatcaagcccgtggtcttgtgctgcctggttataactatctcggacccggaaacggtctcgatcgaggagagcctgtcaacagggcagacgaggtcgcgcgagagcacgacatctcgtacaacgagcagcttgaggcgggagacaacccctacctcaagtacaaccacgcggacgccgagtttcaggagaagctcgccgacgacacatccttcgggggaaacctcggaaaggcagtctttcaggccaagaaaagggttctcgaaccttttggcctggttgaagagggtgctaagacggcccctaccggaaagcggatagacgaccactttccaaaaagaaagaaggcccggaccgaagaggactccaagccttccacctcgtcagacgccgaagctggacccagcggatcccagcagctgcaaatcccagcccaaccagcctcaagtttgggagctgatacaatgtctgcgggaggtggcggcccattgggcgacaataaccaaggtgccgatggagtgggcaatgcctcgggagattggcattgcgattccacgtggatgggggacagagtcgtcaccaagtccacccgaacctgggtgctgcccagctacaacaaccaccagtaccgagagatcaaaagcggctccgtcgacggaagcaacgccaacgcctactttggatacagcaccccctgggggtactttgactttaaccgcttccacagccactggagcccccgagactggcaaagactcatcaacaactactggggcttcagaccccggtccctcagagtcaaaatcttcaacattcaagtcaaagaggtcacggtgcaggactccaccaccaccatcgccaacaacctcacctccaccgtccaagtgtttacggacgacgactaccagctgccctacgtcgtcggcaacgggaccgagggatgcctgccggccttccctccgcaggtctttacgctgccgcagtacggttacgcgacgctgaaccgcgacaacacagaaaatcccaccgagaggagcagcttcttctgcctagagtactttcccagcaagatgctgagaacgggcaacaactttgagtttacctacaactttgaggaggtgcccttccactccagcttcgctcccagtcagaacctcttcaagctggccaacccgctggtggaccagtacttgtaccgcttcgtgagcacaaataacactggcggagtccagttcaacaagaacctggccgggagatacgccaacacctacaaaaactggttcccggggcccatgggccgaacccagggctggaacctgggctccggggtcaaccgcgccagtgtcagcgccttcgccacgaccaataggatggagctcgagggcgcgagttaccaggtgcccccgcagccgaacggcatgaccaacaacctccagggcagcaacacctatgccctggagaacactatgatcttcaacagccagccggcgaacccgggcaccaccgccacgtacctcgagggcaacatgctcatcaccagcgagagcgagacgcagccggtgaaccgcgtggcgtacaacgtcggcgggcagatggccaccaacaaccagagctccaccactgcccccgcgaccggcacgtacaacctccaggaaatcgtgcccggcagcgtgtggatggagagggacgtgtacctccaaggacccatctgagccaagatcccagagacgggggcgcactttcacccctctccggccatgggcggattcggactcaaacacccaccgcccatgatgctcatcaagaacacgcctgtgcccggaaatatcaccagcttctcggacgtgcccgtcagcagcttcatcacccagtacagcaccgggcaggtcaccgtggagatggagtgggagctcaagaaggaaaactccaagaggtggaacccagagatccagtacacaaacaactacaacgacccccagtttgtggactttgccccggacagcaccggggaatgcagaaccaccagacctatcggaacccgataccttacccgacccctttaa

SEQ ID NO: 807 - DNA, 2175 bp, Artificial Sequence
  Synthetic polynucleotide
atgtcttttgttgatcaccctccagattggttggaagaagttggtgaaggtcttcgcgagtttttgggccttgaagcgggcccaccgaaaccaaaacccaatcagcagcatcaagatcaagcccgtggtcttgtgctgcctggttataactatctcggacccggaaacggtctcgatcgaggagagcctgtcaacagggcagacgaggtcgcgcgagagcacgacatctcgtacaacgagcagcttgaggcgggagacaacccctacctcaagtacaaccacgcggacgccgagtttcaggagaagctcgccgacgacacatccttcgggggaaacctcggaaaggcagtctttcaggccaagaaaagggttctcgaaccttttggcctggttgaagagggtgctaagacggcccctaccggaaagcggatagacgaccactttccaaaaagaaagaaggcccggaccgaagaggactccaagccttccacctcgtcagacgccgaagctggacccagcggatcccagcagctgcaaatcccagcccaaccagcctcaagtttgggagctgatacaatgtctgcgggaggtggcggcccattgggcgacaataaccaaggtgccgatggagtgggcaatgcctcgggagattggcattgcgattccacgtggatgggggacagagtcgtcaccaagtccacccgaacctgggtgctgcccagctacaacaaccaccagtaccgagagatcaaaagcggctccgtcgacggaagcaacgccaacgcctactttggatacagcaccccctgggggtactttgactttaaccgcttccacagccactggagcccccgagactggcaaagactcatcaacaactactggggcttcagaccccggtccctcagagtcaaaatcctcaacattcaagtcaaagaggtcacggtgcaggactccaccaccaccatcgccaacaacctcacctccaccgtccaagtgtttacggacgacgactaccagctgccctacgtcgtcggcaacgggaccgagggatgcctgccggccttccctccgcaggtctttacgctgccgcagtacggttacgcgacgctgaaccgcgacaacacagaaaatcccaccgagaggagcagcttcttctgcctagagtactttcccagcaagatgctgagaacgggcaacaactttgagtttacctacaactttgaggaggtgcccttccactccagcttcgctcccagtcagaacctcttcaagctggccaacccgctggtgggccagtacttgtaccgcttcgtgagcacaaataacactggcggagtccagttcaacgagaacctggccgggagatacgccaacacctacaaaaactggttcccggggcccatgggccgaacccagggctggaacctgggctccggggtcaaccgcgccagtgtcagcgccttcgccacgaccaataggatggagctcgagggcgcgagttaccaggtgcccccgcagccgaacggcatgaccaacaacctccagggcagcaacacctatgccctggagaacactatgatcttcaacagccagccggcgaacccgggcaccaccgccacgtacctcgagggcaacatgctcatcaccagcgagagcgagacgcagccggtgaaccgcgtggcgtacaacgtcggcgggcagatggccaccaacaaccagagctccaccactgcccccgcgaccggcacgtacaacctccaggaaatcgtgcccggcagcgtgtggatggagagggacgtgtacctccaaggacccatctgggccaagatcccagagacgggggcgcactttcacccctctccggccatgggcggattcggactcaaacacccaccgcccatgatgctcatcaagaacacgcctgtgcccggaaatatcaccagcttctcggacgtgcccgtcagcagcttcatcacccagtacagcaccgggcaggccaccgtggagatggagtgggagctcaagaaggaaaactccaagaggtggaacccagagatccagtacacaaacaactacaacgacccccagtttgtggactttgccccggacagcaccggggaatacagaaccaccagacctatcggaacccgataccttacccgacccctttaa

SEQ ID NO: 808 - DNA, 2175 bp, Artificial Sequence
  Synthetic polynucleotide
atgtcttttgttgatcaccctccagattggttggaagaagttggtgaaggtcttcgcgagtttttgggccttgaagcgggcccaccgaaaccaaaacccaatcagcagcatcaagatcaagcccgtggtcttgtgctgcctggttataactatctcggacccggaaacggcctcgatcgaggagagcctgtcaacagggcagacgaggtcgcgcgagagcacgacatctcgtacaacgagcagcttgaggcgggagacaacccctacctcaagtacaaccacgcggacgccgagtttcaggagaagctcgccgacgacacatccttcgggggaaacctcggaaaggcagtctttcaggccaagaaaagggttctcgaaccttttggcctggttgaagagggtgctaagacggcccctaccggaaagcggatagacgaccactttccaaaaagaaagaaggcccggaccgaagaggactccaagccttccacctcgtcagacgccgaagctggacccagcggatcccagcagctgcaaatcccagcccaaccagcctcaagtttgggagctgatacaatgtctgcgggaggtggcggcccattgggcgacaataaccaaggtgccgatggagtgggcaatgcctcgggagattggcattgcgattccacgtggatgggggacagagtcgtcaccaagtccacccgaacctgggtgctgcccagctacaacaaccaccagtaccgagagatcaaaagcggctccgtcgacggaagcaacgccaacgcctactttggatacagcaccccctgggggtactttgactttaaccgcttccacagccactggagcccccgagactggcaaagactcatcaacaactactggggcttcagaccccggtccctcagagtcaaaatcttcaacattcaagtcaaagaggtcacggtgcaggactccaccaccatcatcgccaacaacctcacctccaccgtccaagtgtttacggacgacgactaccagctgccctacgtcgtcggcaacgggaccgagggatgcctgccggccttccctccgcaggtctttacgctgccgcagtacggttacgcgacgctgaaccgcgacaacacagaaaatcccaccgagaggagcagcttcttctgcctagagtactttcccagcaagatgctgagaacgggcaacaactttgagtttacctacaactttgaggaggtgcccttccactccagcttcgcccccagtcagaacctcttcaagctggccaacccgctggtggaccagtacttgtaccgcttcgtgagcacaaataacactggcggagtccagttcaacaagaacctggccgggagatacgccaacacctacaaaaactggttcccggggcccatgggccgaacccagggctggaacctgggctccggggtcaaccgcgccagtgtcagcgccttcgccacgaccaataggatggagctcgagggcgcgagttaccaggtgcccccgcagccgaacggcatgaccaacaacctccagggcagcaacacctatgccctggagaacactatgatcttcaacagccagccggcgaacccgggcaccaccgccacgtacctcgagggcaacatgctcatcaccagcgagagcgagacgcagccggtgaaccgcgtggcgtacaacgtcggcgggcagatggccaccaacaaccagagctccaccactgcccccgcgaccggcacgtacaacctccaggaaatcgtgcccggcagcgtgtggatggagagggacgtgtacctccaaggacccatctgggccaagatcccagagacgggggcgcactttcacccctctccggccatgggcggattcggactcaaacacccaccgcccatgatgctcatcaagaacacgcctgtgcccggaaatatcaccagcttctcggacgtgcccgtcagcagcttcatcacccagtacagcaccgggcaggtcaccgtggagatggagtgggagctcaagaaggaaaactccaagaggtggaacccagagatccagtacacaaacaactacaacgacccccagtttgtggactttgccccggacagcaccggggaatacagaaccaccagacctatcggaacccgataccttacccgacccctttaa

SEQ ID NO: 809 - DNA, 2175 bp, Artificial Sequence
  Synthetic polynucleotide
atgtcttttgttgatcaccctccagattggttggaagaagttggtgaaggtcttcgcgagtttttgggccttgaagcgggcccaccgaaaccaaaacccaatcagcagcatcaagatcaagcccgtggtcttgtgctgcctggttataactatctcggacccggaaacggtctcgatcgaggagagcctgtcaacagggcagacgaggtcgcgcgagagcacgacatctcgtacaacgagcagcttgaggcgggagacaacccctacctcaagtacaaccacgcggacgccgagtttcaggagaagctcgccgacgacacatccttcgggggaaacctcggaaaggcagtctttcaggccaagaaaagggttctcgaaccttttggcctggttgaagagggtgctaagacggcccctaccggaaagcggatagacgaccactttccaaaaagaaagaaggcccggaccgaagaggactccaagccttccacctcgtcagacgccgaagctggacccagcggatcccagcagctgcaaatcccagcccaaccagcctcaagtttgggagctgatacaatgtctgcgggaggtggcggcccattgggcgacaataaccaaggtgccgatggagtgggcaatgcctcgggagattggcattgcgattccacgtggatgggggacagagtcgtcaccaagtccacccgaacctgggtgctgcccagctacaacaaccaccagtaccgagagatcaaaagcggctccgtcgacggaagcaacgccaacgcctactttggatacagcaccccctgggggtactttgactttaaccgcttccacagccactggagcccccgagactggcaaagactcatcaacaactactggggcttcagaccccggtccctcagagtcaaaatcttcaacattcaagtcaaagaggtcacggtgcaggactccaccaccaccatcgccaacaacctcacctccaccgtccaagtgtttacggacgacgactaccagctgccctacgtcgtcggcaacgggaccgagggatgcctgccggccttccctccgcaggtctttacgctgccgcagtacggttacgcgacgctgaaccgcgacaacacagaaaatcccaccgagaggagcagcttcttctgcctagagtactttcccagcaagatgctgagaacgggcaacaactttgagtttacctacaactttgaggaggtgcccttccactccagcttcgctcccagtcagaacctcttcaagctggccaacccgctggtggaccagtacttgtaccgcttcgtgagcacaaataacactggcggagtccagttcaacaagaacctggccgggagatacgccaacacctacaaaaactggttcccggggcccatgggccgaacccagggctggaacctgggctccggggtcaaccgcgccagtgtcagcgccttcgccacgaccaataggatggagctcgagggcgcgagttaccaggtgcccccgcagccgaacggcatgaccaacaacctccagggcagcaacacctatgccctggagaacactatgatcttcaacagccagccggcgaacccgggcaccaccgccacgtacctcgagggcaacatgctcatcaccagcgagagcgagacgcagccggtgaaccgcgtggcgtacaacgtcggcgggcagatggccaccaacaaccagagctccaccactgcccccgcgaccggcacgtacaacctccaggaaatcgtgcccggcagcgtgtggatggagagggacgtgtacctccaaggacccatctgggccaagatcccagagacgggggcgcactttcacccctctccggccatgggcggattcggactcaaacacccaccgcccatgatgctcatcaagaacacgcctgtgcccggaaatatcaccagcctctcggacgtgcccgtcagcagcttcatcacccagtacagcaccgggcaggtcaccgtggagatggagtgggagctcaagaaggaaaactccaagaggtggaacccagagatccagtacacaaacaactacaacgacccccagtttgtggactttgccccggacagcaccggggaatacagaaccaccagacctatcggaacccgataccttacccgacccctttaa

SEQ ID NO: 810 - DNA, 2175 bp, Artificial Sequence
  Synthetic polynucleotide
atgtcttttgttgatcaccctccagattggttggaagaagttggtgaaggtcttcgcgagtttttgggccttgaagcgggcccaccgaaaccaaaacccaatcagcagcatcaagatcaagcccgtggtcttgtgctgcctggttataactatctcggacccggaaacggtctcgatcgaggagagcctgccaacagggcagacgaggtcgcgcgagagcacgacatctcgtacaacgagcagcttgaggcgggagacaacccctacctcaagtacaaccacgcgggcgccgagtttcaggagaagctcgccgacgacacatccttcgggggaaacctcggaaaggcagtctttcaggccaagaaaagggttctcgaaccttttggcctggttgaagagggtgctaagacggcccctaccggaaagcggatagacgaccactttccaaaaagaaagaaggcccggaccgaagaggactccaagccttccacctcgtcagacgccgaagctggacccagcggatcccagcagctgcaaatcccagcccaaccagcctcaagtttgggagctgatacaatgtctgcgggaggtggcggcccattgggcgacaataaccaaggtgccgatggagtgggcaatgcctcgggagattggcattgcgattccacgtggatgggggacagagtcgtcaccaagtccacccgaacctgggtgctgcccggctacaacaaccaccagtaccgagagatcaaaagcggctccgtcgacggaagcaacgccaacgcctactttggatacagcaccccctgggggtactttgactttaaccgcttccacagccactggagcccccgagactggcaaagactcatcaacaactactggggcttcagaccccggtccctcagagtcaaaatcttcaacattcaagtcaaagaggtcacggtgcaggactccaccaccaccatcgccaacaacctcacctccaccgtccaagtgtttacggacgacgactaccagctgccctacgtcgtcggcaacgggaccgagggatgcctgccggccttccctccgcaggtctttacgctgccgcagtacggttacgcgacgctgaaccgcgacaacacagaaaatcccaccgagaggagcagcttcttctgcctagagtactttcccagcaagatgctgagaacgggcaacaactttgagtttacctacaactttgaggaggtgcccttccactccagcttcgctcccagtcagaacctcttcaagctggccaacccgctggtggaccagtacttgtaccgcttcgtgagcacaaataatactggcggagtccagttcaacaagaacctggccgggagatacgccaacacctacaaaaactggttcccggggcccatgggccgaacccagggctggaacctgggctccggggtcaaccgcgccagtgtcagcgccttcgccacgaccaataggatggagctcgagggcgcgagttaccaggtgcccccgcagccgaacggcatgaccaacaacctccagggcagcaacacctatgccctggagaacactatgatcttcaacagccagccggcgaacccgggcaccaccgccacgtacctcgagggcaacatgctcatcaccagcgagagcgagacgcagccggtgaaccgcgtggcgtacaacgtcggcgggcagatggccaccaacaaccagagctccaccactgcccccgcgaccggcacgtacaacctccaggaaatcgtgcccggcagcgtgtggatggagagggacgtgtacctccaaggacccatctgggccaagatcccagagacgggggcgcactttcacccctctccggccatgggcggattcggactcaaacacccaccgcccatgatgctcatcaagaacacgcctgtgcccggaaatatcaccagcttctcggacgtgcccgtcagcagcttcatcacccagtacagcaccgggcaggtcaccgtggagatggagtgggagctcaagaaggaaaactccaagaggtggaacccagagatccagtacacaaacaactacaacgacccccagtttgtggactttgccccggacagcaccggggaatacagaaccaccagacctatcggaacccgataccttacccgacccctttaa

SEQ ID NO: 811 - DNA, 2175 bp, Artificial Sequence
  Synthetic polynucleotide
atgtcttttgttgatcaccctccagattggttggaagaagttggtgaaggtcttcgcgagtttttgggccttgaagcgggcccaccgaaaccaaaacccaatcagcagcatcaagatcaagcccgtggtcttgtgctgcctggttataactatctcggacccggaaacggtctcgatcgaggagagcctgtcaacagggcagacgaggtcgcgcgagagcacgacatctcgtacaacgagcagcttgaggcgggagacaacccctacctcaagtacaaccacgcggacgccgagtttcaggagaagctcgccgacgacacatccttcgggggaaacctcggaaaggcagtctttcaggccaagaaaagggttctcgaaccttttggcctggttgaagagggtgctaagacggcccctaccggaaagcggatagacgaccactttccaaaaagaaagaaggcccggaccgaagaggactccaagcctcccacctcgtcagacgccgaagctggacccagcggatcccagcagctgcaaatcccagcccaaccagcctcaagtttgggagctgatacaatgtctgcgggaggtggcggcccattgggcgacaataaccaaggtgccgatggagtgggcaatgcctcgggagattggcattgcgattccacgtggatgggggacagagtcgtcaccaagtccacccgaacctgggtgctgcccagctacaacaaccaccagtaccgagagatcaaaagcggctccgtcgacggaagcaacgccaacgcctactttggatacagcaccccctgggggtactttgactttaaccgcttccacagccactggagcccccgagactggcaaagactcatcaacaactactggggcttcagaccccggtccctcagagtcaaaatcttcaacattcaagtcaaagaggtcacggtgcaggactccgccaccaccatcgccaacaacctcacctccaccgtccaagtgtttacggacgacgactaccagctgccctacgtcgtcggcaacgggaccgagggatgcctgccggccttccctccgcaggtctttacgctgccgcagtacggttacgcgacgctgaaccgcgacaacacagaaaatcccaccgagaggagcagcttcttctgcctagagtactttcccagcaagatgctgagaacgggcaacaactttgagtttacctacaactttgaggaggtgcccttccactccagcttcgctcccagtcagaacctcttcaagctggccaacccgctggtggaccagtacttgtaccgcttcgtgagcacaaataacactggcggagtccagttcaacaagaacctggccgggagatacgccaacacctacaaaaactggttcccggggcccatgggccgaacccagggctggaacctgggctccggggtcaaccgcgccagtgtcagcgccttcgccacgaccaataggatggagctcgagggcgcgagttaccaggtgcccccgcagccgaacggcatgaccaacaacctccagggcagcaacacctatgccctggagaacactatgatcttcaacagccagccggcgaacccgggcaccaccgccacgtacctcgagggcaacatgctcatcaccagcgagagcgagacgcagccggtgaaccgcgtggcgtacaacgtcggcgggcagatggccaccaacaaccagagctccaccactgcccccgcgaccggcacgtacaacctccaggaaatcgtgcccggcagcgtgtggatggagagggacgtgtacctccaaggacccatctgggccaagatcccagagacgggggcgcactttcacccctctccggccatgggcggattcggactcaaacacccaccgcccatgatgctcatcaagaacacgcctgtgcccggaaatatcaccagcttctcggacgtgcccgtcagcagcttcatcacccagtacagcaccgggcaggtcaccgtggagatggagtgggagctcaagaaggaaaactccaagaggtggaacccagagatccagtacacaaacaactacaacgacccccagtttgtggactttgccccggacagcaccggggaatacagaaccaccagacctatcggaacccgataccttacccgacccctttaa

SEQ ID NO: 812 - DNA, 2175 bp, Artificial Sequence
  Synthetic polynucleotide
atgtcttttgttgatcaccctccagattggttggaagaagttggtgaaggtcttcgcgagtttttgggccttgaagcgggcccaccgaaaccaaaacccaatcagcagcatcaagatcaagcccgtggtcttgtgctgcctggttataactatctcggacccggaaacggtctcgatcgaggagagcctgtcaacagggcagacgaggtcgcgcgagagcacgacatctcgtacaacgagcagcttgaggcgggagacaacccctacctcaagtacaaccacgcggacgccgagtttcaggagaagctcgccgacgacacatccttcgggggaaacctcggaaaggcagtctttcaggccaagaaaagggttctcgaaccttttggcctggttgaagagggtgctaagacggcccctaccggaaagcggatagacgaccactttccaaaaagaaagaaggcccggaccgaagaggactccaagccttccacctcgtcagacgccgaagctggacccagcggatcccagcagccgcaaatcccagcccaaccagcctcaagtttgggagctgatacaatgtctgcgggaggtggcggcccattgggcgacaataaccaaggtgccgatggagtgggcaatgcctcgggagattggcattgcgattccacgtggatgggggacagagtcgtcaccaagtccacccgaacctgggtgctgcccagctacaacaaccaccagtaccgagagatcaaaagcggctccgtcgacggaagcaacgccaacgcctactttggatacagcaccccctgggggtactttgactttaaccgcttccacagccactggagcccccgagactggcaaagactcatcaacaactactggggcttcagaccccggtccctcagagtcaaaatcttcaacattcaagtcaaagaggtcacggtgcaggactccaccaccaccatcgccaacaacctcacctccaccgtccaagtgtttacggacgacgactaccagctgccctacgtcgtcggcaacgggaccgagggatgcctgccggccttccctccgcaggtctttacgctgccgcagtacggttacgcgacgctgaaccgcgacaacacagaaaatcccaccgagaggagcagcttcttctgcctagagtactttcccagcaagatgctgagaacgggcaacaactttgagtttacctacaactttgaggaggtgcccttccactccagcttcgctcccagtcagaacctcttcaagctggccaacccgctggtggaccagtacttgtaccgcttcgtgagcacaaataacactggcggagtccagttcaacaagaacctggccgggagatacgccaacacctacaaaaactggttcccggggcccatgggccgaacccagggctggaacctgggctccggggtcaaccgcgccagtgtcagcgccttcgccacgaccaataggatggagctcgagggcgcgagttaccaggtgcccccgcagccgaacggcatgaccaacaacctccagggcagcaacacctatgccctggagaacactatgatcttcaacagccagccggcgaacccgggcaccaccgccacgtacctcgagggcaacatgctcatcaccagcgagagcgagacgcagccggtgaaccgcgtggcgtacaacgtcggcgggcagatggccaccaacaaccagagctccaccactgcccccgcgaccggcacgtacaacctccaggaaatcgtgcccggcagcgtgtggatggagagggacgtgtacctccaaggacccatctgggccaagatcccagagacgggggcgcactttcacccctctccggccatgggcggattcggactcaaacacccaccgcccatgatgctcatcaagaacacgcctgcgcccggaaatatcaccagcttctcggacgtgcccgtcagcagcttcatcacccagtacagcaccgggcaggtcaccgtggagatggagtgggagctcaagaaggaaaactccaagaggtggaacccagagatccagtacacaaacaactacaacgacccccagtttgtggactttgccccggacagcaccggggaatacagaaccaccagacctatcggaacccgataccttacccgacccctttaa

SEQ ID NO: 813 - DNA, 2175 bp, Artificial Sequence
  Synthetic polynucleotide
atgtcttttgttgatcaccctccagattggttggaagaagttggtgaaggtcttcgcgagtttttgggccttgaagcgggcccaccgaaaccaaaacccaatcagcagcatcaagatcaagcccgtggtcttgtgctgcctggttataactatctcggacccggaaacggtctcgatcgaggagagcctgtcaacagggcagacgaggtcgcgcgagagcacgacatctcgtacaacgagcagcttgaggcgggagacaacccctacctcaagtacaaccacgcggacgccgagtttcaggagaagctcgccgacgacacatccttcgggggaaacctcggaaaggcagtctttcaggccaagaaaagggttctcgaaccttttggcctggttgaagagggtgctaagacggcccctaccggaaagcggatagacgaccactttccaaaaagaaagaaggcccggaccgaagaggactccaagcctcccacctcgtcagacgccgaagctggacccagcggatcccagcagctgcaaatcccagcccaaccagcctcaagtttgggagctgatacaatgtctgcgggaggtggcggcccattgggcgacaataaccaaggtgccgatggagtgggcaatgcctcgggagattggcattgcgattccacgtggatgggggacagagtcgtcaccaagtccacccgaacctgggtgctgcccagctacaacaaccaccagtaccgagagatcaaaagcggctccgtcgacggaagcaacgccaacgcctactttggatacagcaccccctgggggtactttgactttaaccgcttccacagccactggagcccccgagactggcaaagactcatcaacaactactggggcttcagaccccggtccctcagagtcaaaatcttcaacattcaagtcaaagaggtcacggtgcaggactccaccaccaccatcgccaacaacctcacctccaccgtccaagtgtttacggacgacgactaccagctgccctacgtcgtcggcaacgggaccgagggatgcctgccggccttccctccgcaggtctttacgctgccgcagtacggttacgcgacgctgaaccgcgacaacacagaaaatcccaccgagaggagcagcttcttctgcctagagtactttcccagcaagatgctgagaacgggcaacaactttgagtttacctacaactttgaggaggtgcccttccactccagcttcgctcccagtcagaacctcttcaagctggccaacccgctggtggaccagtacttgtaccgcttcgtgagcacaaataacactggcggagtccagttcaacaagaacctggccgggagatacgccaacacctacaaaaactggttcccggggcccatgggccgaacccagggctggaacctgggctccggggtcaaccgcgccagtgtcagcgccttcgccacgaccaataggatggagctcgagggcgcgagttaccaggtgcccccgcagccgaacggcatgaccaacaacctccagggcagcaacacctatgccctggagaacactatgatcttcaacagccagccggcgaacccgggcaccaccgccacgtacctcgagggcaacatgctcatcaccagcgagagcgagacgcagccggtgaaccgcgtggcgtacaacgtcggcgggcagatggccaccaacaaccagagctccaccactgcccccgcgaccggcacgtacaacctccaggaaatcgtgcccggcagcgtgtggatggagagggacgtgtacctccaaggacccatctgggccaagatcccagagacgggggcgcactttcacccctctccggccatgggcggattcggactcaaacacccaccgcccatgatgctcatcaagaacacgcctgtgcccggaaatatcaccagcttctcggacgtgcccgtcagcagcttcatcacccagtacagcaccgggcaggtcaccgtggagatggagtgggagctcaagaaggaaaactccaagaggtggaacccagagatccagtacacaaacaactacaacgacccccagtttgtggactttgccccggacagcaccggggaatacagaaccaccagacctatcggaacccgataccttacccgacccctttaa

SEQ ID NO: 814 - DNA, 2175 bp, Artificial Sequence
  Synthetic polynucleotide
atgtcttttgttgatcaccctccagattggttggaagaagttggtgaaggtcttcgcgagtttttgggccttgaagcgggcccaccgaaaccaaaacccaatcagcagcatcaagatcaagcccgtggtcttgtgctgcctggttataactatctcggacccggaaacggtctcgatcgaggagagcctgtcaacagggcagacgaggtcgcgcgagagcacgacatctcgtacaacgagcagcttgaggcgggagacaacccctacctcaagtacaaccacgcggacgccgagtttcaggagaagctcgccgacgacacatccttcgggggaaacctcggaaaggcagtctttcaggccaagaaaagggttctcgaaccttttggcctggttgaagagggtgctaagacggcccctaccggaaagcggatagacgaccactttccaaaaagaaagaaggcccggaccgaagaggactccaagcctcccacctcgtcagacgccgaagctggacccagcggatcccagcagctgcaaatcccagcccaaccagcctcaagtttgggagctgatacaatgtctgcgggaggtggcggcccattgggcgacaataaccaaggtgccgatggagtgggcaatgcctcgggagattggcattgcgattccacgtggatgggggacagagtcgtcaccaagtccacccgaacctgggtgccgcccagctacaacaaccaccagtaccgagagatcaaaagcggctccgtcgacggaagcaacgccaacgcctactttggatacagcaccccctgggggtactttgactttaaccgcttccacagccactggagcccccgagactggcaaagactcatcaacaactactggggcttcagaccccggtccctcagagtcaaaatcttcaacattcaagtcaaagaggtcacggtgcaggactccaccaccaccatcgccaacaacctcacctccaccgtccaagtgtttacggacgacgactaccagctgccctacgtcgtcggcaacgggaccgagggatgcctgccggccttccctccgcaggtctttacgctgccgcagtacggttacgcgacgctgaaccgcgacaacacagaaaatcccaccgagaggagcagcttcttctgcctagagtactttcccagcaagatgctgagaacgggcaacaactttgagtttacctacaactttgaggaggtgcccttccactccagcttcgctcccagtcagaacctcttcaagctggccaacccgctggtggaccagtacttgtaccgcttcgtgagcacaaataacactggcggagtccagttcaacaagaacctggccgggagatacgccaacacctacaaaaactggttcccggggcccatgggccgaacccagggctggaacctgggctccggggtcaaccgcgccagtgtcagcgccttcgccacgaccaataggatggagctcgagggcgcgagttaccaggtgcccccgcagccgaacggcatgaccaacaacctccagggcagcaacacctatgccctggagaacactatgatcttcaacagccagccggcgaacccgggcaccaccgccacgtacctcgagggcaacatgctcatcaccagcgagagcgagacgcagccggtgaaccgcgtggcgtacaacgtcggcgggcagatggccaccaacaaccagagctccaccactgcccccgcgaccggcacgtacaacctccaggaaatcgtgcccggcagcgtgtggatggagagggacgtgtacctccaaggacccatctgggccaagatcccagagacgggggcgcactttcacccctctccggccatgggcggattcggactcaaacacccaccgcccatgatgctcatcaagaacacgcctgtgcccggaaatatcaccagcttctcggacgtgcccgtcagcagcttcatcacccagtacagcaccgggcaggtcgccgtggagatggagtgggagctcaagaaggaaaactccaagaggtggaacccagagatccagtacacaaacaactacaacgacccccagtttgtggactttgccccggacagcaccggggaatacagaaccaccagacctatcggaacccgataccttacccgacccctttaa

SEQ ID NO: 815 - DNA, 2175 bp, Artificial Sequence
  Synthetic polynucleotide
atgtcttttgttgatcaccctccagattggttggaagaagttggtgaaggtcttcgcgagtttttgggccttgaagcgggcccaccgaaaccaaaacccaatcagcagcatcaagatcaagcccgtggtcttgtgctgcctggttataactatctcggacccggaaacggtctcgatcgaggagagcctgtcaacagggcagacgaggtcgcgcgagagcacgacatctcgtacaacgagcagcttgaggcgggagacaacccctacctcaagtacaaccacgcggacgccgagtttcaggagaagctcgccgacgacacatccttcgggggaaacctcggaaaggcagtctttcaggccaagaaaagggttctcgaaccttttggcctggttgaagagggtgctaagacggcccctaccggaaagcggatagacgaccactttccaaaaagaaagaaggcccggaccgaagaggactccaagccttccacctcgtcagacgccgaagctggacccagcggatcccagcagctgcaaatcccagcccaaccagcctcaagtttgggagctgatacaatgtctgcgggaggtggcggcccattgggcgacaataaccaaggtgccgatggagtgggcaatgcctcgggagattggcattgcgattccacgtggatgggggacagagtcgtcaccaagtccacccgaacctgggtgctgcccagctacaacaaccaccagtaccgagagatcaaaagcggctccgtcgacggaagcaacgccaacgcctactttggatacagcaccccctgggggtactttgactttaaccgcttccacagccactggagcccccgagactggcaaagactcatcaacaactactggggcttcagaccccggtccctcagagtcaaaatcttcaacattcaagtcaaagaggtcacggtgcaggactccaccaccaccatcgccaacaacctcacctccaccgtccaagtgtttacggacgacgactaccagctgccctacgtcgtcggcaacgggaccgagggatgcctgccggccttccctccgcaggtctttacgctgccgcagtacggttacgcgacgctgaaccgcgacaacacagaaaatcccaccgagaggagcagcttcttctgcctagagtactttcccagcaagatgctgagaacgggcaacaactttgagtttacctacaactttgaggaggtgcccttccactccagcttcgctcccagtcagaacctcttcaagctggccaacccgctggtggaccagtacttgtaccgcttcgtgagcacaaataacactggcggagtccagttcaacaagaacctggccgggagatacgccaacacctacaaaaactggttcccggggcccatgggccgaacccagggctggaacctgggctccggggtcaaccgcgccagtgtcagcgccttcgccacgaccaataggatggagctcgagggcgcgagttaccaggtgcccccgcagccgaacggcatgaccaacaacctccagggcagcaacacctatgccctggagaacactatgatcttcaacagccagccggcgaacccgggcaccaccgccacgtacctcgagggcaacatgctcatcaccagcgagagcgagacgcagccggtgaaccgcgtggcgtacaacgtcggcgggcagatggccaccaacaaccagagctccaccactgcccccgcgaccggcacgtacaacctccaggaaatcgtgcccggcagcgtgtggatggagagggacgtgtacctccaaggacccatctgggccaagatcccagagacgggggcgcactttcacccctctccggccatgggcggattcggactcaaacacccaccgcccatgatgctcatcaagaacacgcctgcgcccggaaatatcaccagcttctcggacgtgcccgtcagcagcttcatcacccagtacagcaccgggcaggtcaccgtggagatggagtgggagctcaagaaggaaaactccaagaggtggaacccagagatccagtacacaaacaactacaacgacccccagtttgtggactttgccccggacagcaccggggaatacagaaccaccagacctatcggaacccgataccttacccgacccctttaa

SEQ ID NO: 816 - DNA, 2175 bp, Artificial Sequence
  Synthetic polynucleotide
atgtcttttgttgatcaccctccagattggttggaagaagttggtgaaggtcttcgcgagtttttgggccttgaagcgggcccaccgaaaccaaaacccaatcagcagcatcaagatcaagcccgtggtcttgtgctgcctggttataactatctcggacccggaaacggtctcgatcgaggagagcctgtcaacagggcagacgaggtcgcgcgagagcacgacatctcgtacaacgagcagcttgaggcgggagacaacccctacctcaagtacaaccacgcggacgccgagtttcaggagaagctcgccgacgacacatccttcgggggaaacctcggaaaggcagtctttcaggccaagaaaagggttctcgaaccttttggcctggctgaagagggtgctaagacggcccctaccggaaagcggatagacgaccactttccaaaaagaaagaaggcccggaccgaagaggactccaagccttccacctcgtcagacgccgaagctggacccagcggatcccagcagctgcaaatcccagcccaaccagcctcaagtttgggagctgatacaatgtctgcgggaggtggcggcccattgggcgacaataaccaaggtgccgatggagtgggcaatgcctcgggagattggcattgcgattccacgtggatgggggacagagtcgtcaccaagtccacccgaacctgggtgctgcccagctacaacaaccaccagtaccgagagatcaaaagcggctccgtcgacggaagcaacgccaacgcctactttggatacagcaccccctgggggtactttgactttaaccgcttccacagccactggagcccccgagactggcaaagactcatcaacaactactggggcttcagaccccggtccctcagagccaaaatcttcaacattcaagtcaaagaggtcacggtgcaggactccaccaccaccatcgccaacaacctcacctccaccgtccaagtgtttacggacgacgactaccagctgccctacgtcgtcggcaacgggaccgagggatgcctgccggccttccctccgcaggtctttacgctgccgcagtacggttacgcgacgctgaaccgcgacaacacagaaaatcccaccgagaggagcagcttcttctgcctagagtactttcccagcaagatgctgagaacgggcaacaaccttgagtttacctacaactttgaggaggtgcccttccactccagcttcgctcccagtcagaacctcttcaagctggccaacccgctggtggaccagtacttgtaccgcttcgtgagcacaaataacactggcggagtccagttcaacaagaacctggccgggagatacgccaacacctacaaaaactggttcccggggcccatgggccgaacccagggctggaacctgggctccggggtcaaccgcgccagtgtcagcgccttcgccacgaccaataggatggagctcgagggcgcgagttaccaggtgcccccgcagccgaacggcatgaccaacaacctccagggcagcaacacctatgccctggagaacactatgatcttcaacagccagccggcgaacccgggcaccaccgccacgtacctcgagggcaacatgctcatcaccagcgagagcgagacgcagccggtgaaccgcgtggtgcacaacgtcggcgggcagatggccaccaacaaccagagctccaccactgcccccgcgaccggcacgtacaacctccaggaaatcgtgcccggcagcgtgtggatggagagggacgtgtacctccaaggacccatctgggccaagatcccagagacgggggcgcactttcacccctctccggccatgggcggattcggactcaaacacccaccgcccatgatgctcatcaagaacacgcctgtgcccggaaatatcaccagcttctcggacgtgcccgtcagcagcttcatcacccagtacagcaccgggcaggtcaccgtggagatggagtgggagctcaagaaggaaaactccaagaggtggaacccggagatccagtacacaaacaactacaacgacccccagtttgtggactttgccccggacagcaccggggaatacagaaccaccagacctatcggaacccgataccttacccgacccctttaa

SEQ ID NO: 817 - DNA, 2175 bp, Artificial Sequence
  Synthetic polynucleotide
atgtcttttgttgatcaccctccagattggttggaagaagttggtgaaggtcttcgcgagtttttgggccttgaagcgggcccaccgaaaccaaaacccaatcagcagcatcaagatcaagcccgtggtcttgtgctgcctggttataactatctcggacccggaaacggtctcgatcgaggagagcctgtcaacagggcagacgaggtcgcgcgagagcacgacatctcgtacaacgagcagcttgaggcgggagacaacccctacctcaagtacaaccacgcggacgccgagtttcaggagaagctcgccgacgacacatccttcgggggaaacctcggaaaggcagtctttcaggccaagaaaagggttctcgaaccttttggcctggttgaagagggtgctaagacggcccctaccggaaagcggatagacgaccactttccaaaaagaaagaaggcccggaccgaagaggactccaagccttccacctcgtcagacgccgaagctggacccagcggatcccagcagctgcaaatcccagcccaaccagcctcaagtttgggagctgatacaatgtctgcgggaggtggcggcccattgggcgacaataaccaaggtgccgatggagtgggcaatgcctcgggagattggcattgcgattccacgtggatgggggacagagtcgtcaccaagtccacccgaacctgggtgctgcccagctacaacaaccaccagtaccgagagatcaaaagcggctccgtcgacggaggcaacgccaacgcctactttggatacagcaccccctgggggtactttgactttaaccgcttccacagccactggagcccccgggactggcaaagactcatcaacaactactggggcttcagaccccggtccctcagagtcaaaatcttcaacattcaagtcaaagaggtcacggtgcaggactccaccaccaccatcgccaacaacctcacctccaccgtccaagtgtttacggacgacgactaccagctgccctacgtcgtcggcaacgggaccgagggatgcctgccggccttccctccgcaggtctttacgctgccgcagtacggttacgcgacgctgaaccgcgacaacacagaaaatcccaccgagaggagcagcttcttctgcctagagtactttcccagcaagatgctgagaacgggcaacaactttgagtttacctacaactttgaggaggtgcccttccactccagcttcgctcccagtcagaacctcttcaagctggccaacccgctggtggaccagtacttgtaccgcttcgtgagcacaaataacactggcggagtccagttcaacaagaacctggccgggagatacgccaacacctacaaaaactggttcccggggcccatgggccgaacccagggctggaacctgggctccggggtcaaccgcgccagtgtcagcgccttcgccacgaccaataggatggagctcgagggcgcgagttaccaggtgcccccgcagccgaacggcatgaccaacaacctccagggcagcaacacctatgccctggagaacactatgatcttcaacagccagccggcgaacccgggcaccaccgccacgtacctcgagggcaacatgctcatcaccagcgagagcgagacgcagccggtgaaccgcgtggcgtacaacgtcggcgggcagatggccaccaacaaccagagctccaccactgcccccgcgaccggcacgtacaacctccaggaaatcgtgcccggcagcgtgtggatggagagggacgtgtacctccaaggacccatctgggccaagatcccagagacgggggcgcactttcacccctctccggccatgggcggattcggactcaaacacccaccgcccatgatgctcatcaagaacacgcctgcgcccggaaatatcaccagcttctcggacgtgcccgtcagcagcttcatcacccagtacagcaccgggcaggtcaccgtggagatggagtgggagctcaagaagggaaactccaagaggtggaacccagagatccagtacacaaacaactacaacgacccccagtttgtggactttgccccggacagcaccggggaatacagaaccaccagacctatcggaacccgataccttacccgacccctttaa

SEQ ID NO: 818 - DNA, 2175 bp, Artificial Sequence
  Synthetic polynucleotide
atgtcttttgttgatcaccctccagattggttggaagaagttggtgaaggtcttcgcgagtttttgggccttgaagcgggcccaccgaaaccaaaacccaatcagcagcatcaagatcaagcccgtggtcttgtgctgcctggttataactatctcggacccggaaacggtctcgatcgaggagagcctgtcaacagggcagacgaggtcgcgcgagagcacgacatctcgtacaacgagcagcttgaggcgggagacaacccctacctcaagtacaaccacgcggacgccgagtttcaggagaagctcgccgacgacacgtccttcgggggaaacctcggaaaggcagtctttcaggccaagaaaagggttctcgaaccttttggcctggttgaagagggtgctaagacggcccctaccggaaagcggatagacgaccactttccaaaaagaaagaaggcccggaccgaagaggactccaagccttccacctcgtcagacgccgaagctggacccagcggatcccagcagctgcaaatcccagcccaaccagcctcaagtttgggagctgatacaatgtctgcgggaggtggcggcccattgggcgacaataaccaaggtgccgatggagtgggcaatgcctcgggagattggcattgcgattccacgtggatgggggacagagtcgtcaccaagtccacccgaacctgggtgctgcccagctacaacaaccaccagtaccgagagatcaaaagcggctccgtcgacggaagcaacgccaacgcctactttggatacagcaccccctgggggtactttgactttaaccgcttccacagccactggagcccccgagactggcaaagactcatcaacaactactggggcttcagaccccggtccctcagagtcaaaatcttcaacattcaagtcaaagaggtcacggtgcaggactccaccaccaccatcgccaacaacctcacctccaccgtccaagtgtttacggacgacgactaccagctgccctacgtcgtcggcaacgggaccgagggatgcctgccggccttccctccgcaggtctttacgctgccgcagtacggttacgcgacgctgaaccgcgacaacacagaaaatcccaccgagaggagcagcttcttctgcctagagtactttcccagcaagatgctgagaacgggcaacaactttgagtttacctacaactttgaggaggtgcccttccactccagcttcgctcccagtcagaacctcttcaagctggccaacccgctggtggaccagtacttgtaccgcttcgtgagcacaaataacactggcggagtccagttcaacaagaacctggccgggagatacgccaacacctacaaaaactggttcccggggcccatgggccgaacccagggctggaacctgggctccggggtcaaccgcgccagtgtcagcgccttcgccacgaccaataggatggagctcgagggcgcgagttaccaggtgcccccgcagccgaacggcatgaccaacaacctccagggcagcaacacctatgccctggagaacactatgatcttcaacagccagccggcgaacccgggcaccaccgccacgtacctcgagggcaacatgctcatcaccagcgagagcgagacgcagccggtgaaccgcgtggcgtacaacgtcggcgggcagatggccaccaacaaccagagctccaccactgcccccgcgaccggcacgtacaacctccaggaaatcgtgcccggcagcgtgtggatggagagggacgtgtacctccaaggacccatctgggccaagatcccagagacgggggtgcactttcacccctctccggccatgggcggattcggactcaaacacccaccgcccatgatgctcatcaagaacacgcctgtgcccggaaatatcaccagcttctcggacgtgcccgtcagcagcttcatcacccagtacagcaccgggcaggtcaccgtggagatggagtgggagctcaagaaggaaaactccaagaggtggaacccagagatccagtacacaaacaactacaacgacccccagtttgtggactttgccccggacagcaccggggaatacagaaccaccagacctatcggaacccgataccttacccgacccctttaa

SEQ ID NO: 819 - DNA, 2175 bp, Artificial Sequence
  Synthetic polynucleotide
  modified_base (1652)..(1652): a, c, t, or g
  misc_feature (1652)..(1652): n is a, c, g, or t
atgtcttttgttgatcaccctccagattggttggaagaagttggtgaaggtcttcgcgagtttttgggccttgaagcgggcccaccgaaaccaaaacccaatcagcagcatcaagatcaagcccgtggtcttgtgctgcctggttataactatctcggacccggaaacggtctcgatcgaggagagcctgtcaacagggcagacgaggtcgcgcgagagcacgacatctcgtacaacgagcagcttgaggcgggagacaacccctacctcaagtacaaccacgcggacgccgagtttcaggagaagctcgccgacgacacatccttcgggggaaacctcggaaaggcagtctttcaggccaagaaaagggttctcgaaccttttggcctggttgaagagggtgctaagacggcccctaccggaaagcggatagacgaccactttccaaaaagaaagaaggcccggaccgaggaggactccaagccttccacctcgtcagacgccgaagctggacccagcggatcccagcagctgcaaatcccagcccaaccagcctcaagtttgggagctgatacaatgtctgcgggaggtggcggcccattgggcgacaataaccaaggtgccgatggagtgggcaatgcctcgggagattggcattgcgattccacgtggatgggggacagagtcgtcaccaagtccacccgaacctgggtgctgcccagctacaacaaccaccagtaccgagagatcaaaagcggctccgtcgacggaagcaacgccaacgcctactttggatacagcaccccctgggggtactttgactttaaccgcttccacagccactggagcccccgagactggcaaagactcatcaacaactactggggcttcagaccccggtccctcagagtcaaaatcttcaacattcaagtcaaagaggtcacggtgcaggactccaccaccaccatcgccaacaacctcacctccaccgtccaagtgtttacggacgacgactaccagctgccctacgtcgtcggcaacgggaccgagggatgcctgccggccttccctccgcaggtctttacgctgccgcagtacggttacgcgacgctgaaccgcgacaacacagaaaatcccaccgagaggagcagcttcttctgcctagagtactttcccagcaagatgctgagaacgggcaacaactttgagtttacctacaactttgaggaggtgcccttccactccagcttcgctcccagtcagaacctcttcaagctggccaacccgctggtggaccagtacttgtaccgcttcgtgagcacaaataacactggcggagtccagttcaacaagaacctggccgggagatacgccaacacctacaaaaactggttcccggggcccatgggccgaacccagggctggaacctgggctccggggtcaaccgcgccagtgtcagcgccttcgccacgaccaataggatggagctcgagggcgcgagttaccaggtgcccccgcagccgaacggcatgaccaacaacctccagggcagcaacacctatgccctggagaacactatgatcttcaacagccagccggcgaacccgggcaccaccgccacgtacctcgagggcagcatgctcatcaccancgagagcgagacgcagccggtgaaccgcgtggcgtacaacgtcggcgggcagatggccaccaacaaccagagctccaccactgcccccgcgaccggcacgtacaacctccaggaaatcgtgcccggcagcgtgtggatggagagggacgtgtacctccaaggacccatctgggccaagatcccagagacgggggcgcactttcacccctctccggccatgggcggattcggactcaaacacccaccgcccatgatgctcatcaagaacacgcctgtgcccggaaatatcaccagcttctcggacgtgcccgtcagcagcttcatcacccagtacagcaccgggcaggtcaccgtggagatggagtgggagctcaagaaggaaaactccaagaggtggaacccagagatccagtacacaaacaactacaacgacccccagtttgtggactttgccccggacagcaccggggaatacagaaccaccagacctatcggaacccgataccttacccgacccctttaa

SEQ ID NO: 820 - DNA, 2211 bp, Artificial Sequence
  Synthetic polynucleotide
atggctgctgacggttatcttccagattggctcgaggacaacctttctgaaggcattcgtgagtggtgggctctgaaacctggagtccctcaacccaaagcgaaccaacaacaccaggacaaccgtcggggtcttgtgcttccgggttacaaatacctcggacccggtaacggactcgacaaaggagagccggtcaacgaggcggacgcggcagccctcgaacacgacaaagcttacgaccagcagctcaaggccggtgacaacccgtacctcaagtacaaccacgccgacgccgagtttcaggagcgtcttcaagaagatacgtcttttgggggcaaccttggcagagcagtcttccaggccaaaaagaggatccttgagcctcttggtctggttgaggaagcagctaaaacggctcctggaaagaagaggcctgtagatcagtctcctcaggaaccggactcatcatctggtgttggcaaatcgggcaaacagcctgccagaaaaagactaaatttcggtcagactggcgactcagagtcagtcccagaccctcaacctctcggagaaccaccagcagcccccacaagtttgggatctaatacaatggcttcaggcggtggcgcaccaatggcagacaataacgagggtgccgatggagtgggtaattcctcaggaaattggcattgcgattcccaatggctgggcgacagagtcatcaccaccagcaccagaacctgggccctgcccacttacaacaaccatctctacaagcaaatctccagccaatcaggagcttcaaacgacaaccactactttggctacagcaccccttgggggtattttgactttaacagattccactgccacttctcaccacgtgactggcagcgactcattaacaacaactggggattccggcccaagaaactcagcttcaagctcttcaacatccaagttaaagaggtcacgcagaacgatggcacgacgactattgccaataaccttaccagcacggttcaagtgtttacggactcggagtatcagctcccgtacgtgctcgggtcggcgcaccaaggctgtctcccgccgtttccagcggacgtcttcatggtccctcagtatggatacctcaccctgaacaacggaagtcaagcggtgggacgctcatccttttactgcctggagtacttcccttcgcagatgctaaggactggaaataacttccaattcagctataccttcgaggatgtaccttttcacagcagctacgctcacagccagagtttggatcgcttgatgaatcctcttattgatcagtatctgtactacctgaacagaacgcaaggaacaacctctggaacaaccaaccaatcacggctgctttttagccaggctgggcctcagtctatgtctttgcaggccagaaattggctacctgggccctgctaccggcaacagagactttcaaagactgctaacgacaacaacaacagtaactttccttggacagcggccagcaaatatcatctcaatggccgcgactcgctggtgaatccaggaccagctatggccagtcacaaggacgatgaagaaaaatttttccctatgcacggcaatctaatatttggcaaagaagggacaacggcaagtaacgcagaattagataatgtaatgattacggatgaagaagagattcgtaccaccaatcctgtggcaacagagcagtatggaactgtggcaaataacttgcagagctcaaatacagctcccacgactagaactgtcaatgatcagggggccttacctggcatggtgtggcaagatcgtgacgtgtaccttcaaggacctatctgggcaaagattcctcacacggatggacactttcatccttctcctctgatgggaggctttggactgaaacatccgcctcctcaaatcatgatcaaaaatactccggtaccggcaaatcctccgacgactttcagcccggccaagtttgcttcatttatcactcagtactccactggacaggtcagcgtggaaattgagtgggagctacagaaagaaaacagcaaacgttggaatccagagattcagtacacttccaactacaacaagtctgttaatgtggactttactgtagacactaatggtgtttatagtgaacctcgccctattggaacccggtatctcacacgaaacttgtaa

SEQ ID NO: 821 - DNA, 2205 bp, Artificial Sequence; identical to SEQ ID NO: 89
  Synthetic polynucleotide

SEQ ID NO: 822 - DNA, 2234 bp, Artificial Sequence
  Synthetic polynucleotide
atgtcttttgttgatcaccctccagattggttggaagaagttggtgaaggtcttcgcgagtttttgggccttgaagcgggcccaccgaaaccaaaacccaatcagcagcatcaagatcaagcccgtggtcttgtgctgcctggttataactatctcggacccggaaacggtctcgatcgaggagagcctgtcaacagggcagacgaggtcgcgcgagagcacgacatctcgtacaacgagcagcttgaggcgggagacaacccctacctcaagtacaaccacgcggacgccgagtttcaggagaagctcgccgacgacacatccttcgggggaaacctcggaaaggcagtctttcaggccaagaaaagggttctcgaaccttttggcctggttgaagagggtgctaagacggcccctaccggaaagcggatagacgaccactttccaaaaagaaagaaggctcggaccgaagaggactccaagccttccacctcgtcagacgccgaagctggacccagcggatcccagcagctgcaaatcccagcccaaccagcctcaagtttgggagctgatacaatgtctgcgggaggtggcggcccattgggcgacaataaccaaggtgccgatggagtgggcaatgcctcgggagattggcattgcgattccacgtggatgggggacagagtcgtcaccaagtccacccgaacctgggtgctgcccagctacaacaaccaccagtaccgagagatcaaaagcggctccgtcgacggaagcaacgccaacgcctactttggatacagcaccccctgggggtactttgactttaaccgcttccacagccactggagcccccgagactggcaaagactcatcaacaactactggggcttcagaccccggtccctcagagtcaaaatcttcaacattcaagtcaaagaggtcacggtgcaggactccaccaccaccatcgccaacaacctcacctccaccgtccaagtgtttacggacgacgactaccagctgccctacgtcgtcggcaacgggaccgagggatgcctgccggccttccctccgcaggtctttacgctgccgcagtacggttacgcgacgctgaaccgcgacaacacagaaaatcccaccgagaggagcagcttcttctgcctagagtactttcccagcaagatgctgagaacgggcaacaactttgagtttacctacaactttgaggaggtgcccttccactccagcttcgctcccagtcagaacctgttcaagctggccaacccgctggtggaccagtacttgtaccgcttcgtgagcacaaataacactggcggagtccagttcaacaagaacctggccgggagatacgccaacacctacaaaaactggttcccggggcccatgggccgaacccagggctggaacctgggctccggggtcaaccgcgccagtgtcagcgccttcgccacgaccaataggatggagctcgagggcgcgagttaccaggtgcccccgcagccgaacggcatgaccaacaacctccagggcagcaacacctatgccctggagaacactatgatcttcaacagccagccggcgaacccgggcaccaccgccacgtacctcgagggcaacatgctcatcaccagcgagagcgagacgcagccggtgaaccgcgtggcgtacaacgtcggcgggcagatggccaccaacaaccagagctccaccactgcccccgcgaccggcacgtacaacctccaggaaatcgtgcccggcagcgtgtggatggagagggacgtgtacctccaaggacccatctgggccaagatcccagagacgggggcgcactttcacccctctccggccatgggcggattcggactcaaacacccaccgcccatgatgctcatcaagaacacgcctgtgcccggaaatatcaccagcttctcggacgtgcccgtcagcagcttcatcacccagtacagcaccgggcaggtcaccgtggagatggagtgggagctcaagaaggaaaactccaagaggtggaacccagagatccagtacacaaacaactacaacgacccccagtttgtggactttgccccggacagcaccggggaatacagaaccaccagacctatcggaacccgataccttacccgacccctttaacccattcatgtcgcataccctcaataaaccgtgtattcgtgtcagtaaaatactgcctc

SEQ ID NO: 823 - protein, 736 aa, Artificial Sequence
  Synthetic polypeptide
MAADGYLPDWLEDNLSEGIREWWALKPGVPQPKANQQHQDNRRGLVLPGYKYLGPGNGLDKGEPVNEADAAALEHDKAYDQQLKAGDNPYLKYNHADAEFQERLQEDTSFGGNLGRAVFQAKKRILEPLGLVEEAAKTAPGKKRPVDQSPQEPDSSSGVGKSGKQPARKRLNFGQTGDSESVPDPQPLGEPPAAPTSLGSNTMASGGGAPMADNNEGADGVGNSSGNWHCDSQWLGDRVITTSTRTWALPTYNNHLYKQISSQSGASNDNHYFGYSTPWGYFDFNRFHCHFSPRDWQRLINNNWGFRPKKLSFKLFNIQVKEVTQNDGTTTIANNLTSTVQVFTDSEYQLPYVLGSAHQGCLPPFPADVFMVPQYGYLTLNNGSQAVGRSSFYCPEYFPSQMLRTGNNFQFSYTFEDVPFHSSYAHSQSLDRLMNPLIDQYLYYLNRTQGTTSGTTNQSRLLFSQAGPQSMSLQARNWLPGPCYRQQRLSKTANDNNNSNFPWTAASKYHLNGRDSLVNPGPAMASHKDDEEKFFPMHGNLIFGKEGTTASNAELDNVMITDEEEIRTTNPVATEQYGTVANNLQSSNTAPTTRTVNDQGALPGMVWQDRDVYLQGPIWAKIPHTDGHFHPSPLMGGFGLKHPPPQIMIKNTPVPANPPTTFSPAKFASFITQYSTGQVSVEIEWELQKENSKRWNPEIQYTSNYNKSVNVDFTVDTNGVYSEPHPIGTRYLTRNL

SEQ ID NO: 824 - protein, 736 aa, Artificial Sequence
  Synthetic polypeptide
MAADGYLPDWLEDNLSEGIREWWALKPGVPQPKANQQHQDNRRGLVLPGYKYLGPGNGLDKGEPVNEADAAALEHDKAYDQQLKAGDNPYLKYNHADAEFQERLQEDTSFGGNLGRAVFQAKKRILEPLGLVEEAAKTAPGKKRPVDQSPQEPDSSSGVGKSGKQPARKRLNFGQTGDSESVPDPQPLGEPPAAPTSLGSNTMASGGGAPMADNNEGADGVGNSSGNWHCDSQWLGDRVITTSTRTWALPTYNNHLYKQISSQSGASNDNHYFGYSTPWGYFDFNRFHCHFSPRDWQRLINNNWGFRPKKLSFKLFNIQVKEVTQNDGTTTVANNLTSTVQVFTDSEYQLPYVLGSAHQGCLPPFPADVFMVPQYGYLTLNNGSQAVGRSSFYCLEYFPSQMLRTGNNFQFSYTFEDVPFHSSYAHSQSLDRLMNPLIDQYLYYLNRTQGTTSGTTNQSRLLFSQAGPQSMSLQARNWLPGPCYRQQRLSKTANDNNNSNFPWTAASKYHLNGRDSLVNPGPAMASHKDDEEKFFPMHGNLIFGKEGTTASNAELDNVMITDEEEIRTTNPVATEQYGTVANNLQSSNTAPTTRTVNDQGALPGMVWQDRDVYLQGPIWAKIPHTDGHFHPSPLMGGFGLKHPPPQIMIKNTPVPANPPTTFSPAKFASFITQYSTGQVSVEIEWELQKENSKRWNPEIQYTSNYNKSVNVDFTVDTNGVYSEPRPIGTRYLTRNL

SEQ ID NO: 825 - protein, 736 aa, Artificial Sequence
  Synthetic polypeptide
MAADGYLPDWLEDNLSEGIREWWALKPGVPQPKANQQHQDNRRGLVLPGYKYLGPGNGLDKGEPVNEADAAALEHDKAYDQQLKAGDNPYLKYNHADAEFQERLQEDTSFGGNLGRAVFQAKKRILEPLGLVEEAAKTAPGKKRPVDQSPQEPDSSSGVGKSGKQPARKRLNFGQTGDSESVPDPQPLGEPPAAPTSLGSNTMASGGGAPMADNNEGADGVGNSSGNWHCDSQWLGDRVITTSTRTWALPTYNNHLYKQISGQSGASNDNHYFGYSTPWGYFDFNRFHCHFSPRDWQRLINNNWGFRPKKLSFKLFNIQVKEVTQNDGTTTIANNLTSTVQVFTDSEYQLPYVLGSAHQGCLPPFPADVFMVPQYGYLTLNNGSQAVGRSSFYCLEYFPSQMLRTGNNFQFSYTFEDVPFHSSYAHSQSLDRLMNPLIDQYLYYLNRTQGTTSGTTNQSRLLFSQAGPQSMSLQARNWLPGPCYRQQRLSKTANGNNNSNFPWTAASKYHLNGRDSLVNPGPAMASHKDDEEKFFPMHGNLIFGKEGTTASNAELDNVMITDEEEIRTTNPVATEQCGTVANNLQSSNTAPTTRTVNDQGALPGMVWQDRDVYLQGPIWAKIPHTDGHFHPSPLMGGFGLKHPPPQIMIKNTPVPANPPTTFSPAKFASFITQYSTGQVSVEIEWELQKENSKRWNPEIQYTSNYNKSVNVDFTVDTNGVYSEPRPIGTRYLTRNL

SEQ ID NO: 826 - protein, 736 aa, Artificial Sequence
  Synthetic polypeptide
MAADGYLPDWLEDNLSEGIREWWALKPGVPQPKANQQHQDNRRGLVLPGYKYLGPGNGLDKGEPVNEADAAALEHDKAYDQQLKAGDNPYLKYNHADAEFQERLQEDTSFGGNLGRAVFQAKKRILEPLGLVEGAAKTAPGKKRPVDQSPQEPDSSSGVGKSGKQPARKRLNFGQTGDSESVPDPQPLGEPPAAPTSLGSNTMASGGGAPMADNNEGADGVGNSSGNWHCDSQWLGDRVITTSTRTWALPTYNSHLYKQISSQSGASNDNHYFGYSTPWGYFDFNRFHCHFSPRDWQRLINNNWGFRPKKLSFKLFNIQVKEVTQNDGTTTIANNLTSTVQVFTDSEYQLPYVLGSAHQGCLPPFPADAFMVPQYGYLTLNNGSQAVGRSSFYCLEYFPSQMLRTGNNFQFSYTFEDVPFHGSYAHSQSLDRLMNPLIDQYLYYLNRTQGTTSGTTNQSRLLFSQAGPQSMSLQARNWLPGPCYRQQRLSKTANDNNNSNFPWTAASKYHLNGRDSLVNPGPAMASHKDDEEKFFPMHGNLIFGKEGTTASNAELDNVMITDEEEIRTTNPVATEQYGTVANNLQSSNTAPTTRTVNDQGALPGMVWQDRDVYLQGPIWAKIPHTDGHFHPSPLMGGFGLKHPPPQIMIKNTPVPANPPTTFSPAKFASFITQYSTGQVSVEIEWELQKENSKRWNPEIQYTSNYNKSVNVDFTVDTNGVYSEPRPIGTRYLTRNS

SEQ ID NO: 827 - protein, 736 aa, Artificial Sequence
  Synthetic polypeptide
MAADGYLPDWLEDNLSEGIREWWALKPGVPQPKANQQHQDNRRGLVLPGYKYLGPGNGLDKGEPVNEADAAALEHDKAYDQQLKAGDNPYLKYNHADAEFQERLQEDTSFGGNLGRAVFQAKKRILEPLGLVEGAAKTAPGKKRPVDQSPQEPDSSSGVGKSGKQLARKRLNFGQTGDSESVPDPQPLGEPPAAPTSLGSNTMASGGGAPMADNNEGADGVGNSSGNWHCDSQWLGDRVITTSTRTWALPTYNSHLYKQISGQSGASNDNHYFGYSTPWGYFDFNRFHCHFSPRDWQRLINNNWGFRPKKLSFKLFNIQVKEVTQNDGTTTIANNLTSTVQVFTDSEYQLPYVLGSAHQGCLPPFPADVFMVPQYGYLTLNNGSQAVGRSSFYCLEYFPSQMLRTGNNFQFSYTFEDVPFHSSYAHSQSLDRLMNPLIDQYLYYLNRTQGTTSGTTNQSRLLFSQAGPQSMSLQARNWLPGPCYRQQRLSKTANDNNNSNFPWTAASKYHLNGRDSLVNPGPAMASHKDDEEKFFPMHGNLIFGKEGTTASNAELDNVMITDEEEIRTTNPVATEQYGTVANNLQSSNTAPTTRTVNDQGALPGMVWQDRDVYLQGPIWAKIPHTDGHFHPSPLMGGFGLKHPPPQIMIKNTPVPANPPTTFSPAKFASFITQYSTGQVSVEIEWELQKENSKRWNPEIQYTSNYNKSVNVDFTVDTNGVYSEPRPIGTRYLTRNL

SEQ ID NO: 828 - protein, 736 aa, Artificial Sequence
  Synthetic polypeptide
MAADGYLPDWLEDNLSEGIREWWALKPGVPQPKANQQHQDDRRGLVLPGYKYLGPGNGLDKGEPVNEADAAALEHDKAYDQQLKAGDNPCLKYNHADAEFQERLQEDTSFGGNLGRAVFQAKKRILEPLGLVEEAAKTAPGKKRPVDQSPQEPDSSSGVGKSGKQPARKRLNFGQTGDSESVPDPQPLGEPPAAPTSLGSNTMASGGSAPMADNNEGADGVGNSSGNWHCDSQWLGDRVITTSTRTWALPTYNNHLYKQISSQSGASNDNHYFGYSTPWGYFDFNRFHCHFSPRDWQRLINNNWGFRPKKLSFKLFNIQVKEVTQNDGTTTIANNLTSTVQVFTDSEYQLPYVLGSAHQGCLPPFPADVFMVPQYGYLTLNNGSQAVGRSSFYCLEYFPSQMLRTGNNFQFSYTFEDVPFHSSYAHSQSLDRLMDPLIDQYLYYLNRTQGTTSGTTNQSRLLFSQAGPQSMSLQARNWLPGPCYRQQRLSKTANDNNNSNFPWTAASKYHLNGRDSLVNPGPAMASHKDDEEKFFPMHGNLIFGKEGTTASNAELDNVMITDEEEIRTTNPVATEQYGTVANNLQSSNTAPTTRTVNDQGALPGMVWQDRDVYLQGPIWAKIPHTDGHFHPSPLMGGFGLKHPPPQIMIKNTPVPANPPTTFSPAKFASFITQYSTGQVSVEIEWELQKENSKRWNPEIQYTSNYNKSVNVDFTVDTNGVYSEPRPIGTRYLTRNL

SEQ ID NO: 829 - protein, 736 aa, Artificial Sequence
  Synthetic polypeptide
MAADGYLPDWLEDNLSEGIREWWALKPGVPQPKANQQHQDDRRGLVLPGYKYLGPGNGLDKGEPVNEADAAALEHDKAYDQQLKAGDNPYLKYNHADAEFQERLQEDTSFGGNLGRAVFQAKKRILEPLGLVEEAAKTAPGKKRPVDQSPQEPDSSSGVGKSGKQPARKRLNFGQTGDSESVPDPQPLGEPPAAPTSLGSNTMASGGGAPMADNNEGADGVGNSSGNWHCDSQWLGNRVITTSTRTWALPTYNNHLYKQISSQSGASNDNHYFGYSTPWGYFDFNRFHCHFSPRDWQRLINNNWGFRPKKLSFKLFNIQVKEVTQNDGTTTIANNLTSTVQVFTDSEYQLPYVLGSAHQGCLPPFPADVFMVPQYGYLTLNNGSQAVGRSSFYCLEYFPSQMLRTGNNFQFSYTFEDVPFHSSYAHSQSLDRLMNPLIDQYLYYLNRTQGTTSGTTNQSRLLFSQAGPQSMSLQARNWLPGPCYRQQRLSKTANDNNNSNFPWTAASKYHLNGRDSLVNPGPAMASHKDDEEKFFPMHGNLIFGKEGTTASNAELDNVMITDEEEIRTTNPVATEQYGTVANNLQSSNTAPTTRTVNDQGALPGMVWQDRDVYLQGPIWAKIPHTDGHFHPSPLMGGFGLKHPPPQIMIKNTPVPANPPTTFSPAKFASFITQYSTGQVSVEIEWELQKENSKRWNPEIQYTSNYNKSVNVDFTVDTNGVYSEPRPIGTRYLTRNL

SEQ ID NO: 830 - protein, 736 aa, Artificial Sequence
  Synthetic polypeptide
MAADGYLPDWLEDNLSEGIREWWALKPGVPQPKANQQHQDDRRGLVLPGYKYLGPGNGLDKGEPVNEADAAALEHDKAYDQQLKAGDNPYLKYNHADAEFQERLQEDTSFGGNLGRAVFQAKKRILEPLGLVEEAAKTAPGKKRPVDQSPQEPDSSSGVGKSGKQPARKRLNFGQTGDSESVPDPQPLGEPPAAPTSLGSNTMASGGGAPMADNNEGADGVGNSSGNWHCDSQWLGDRVITTSTRTWALPTYNNHLYKQISSQSGASNDNHYFGYSTPWGYFDFNRFHCHFSPRDWQRLINNNWGFRPKKLSFKLFNIQVKEVTQNDGTTTIANNLTSTVQVFTDSEYQLPYVLGSAHQGCLPPFPADVFMVPQYGYLTLNNGSQAVGRSSFYCLEYFPSQMLRTGNNFQFSYTFEDVPFHSSYAHSQSLDRLMNPLIDQYLYYLNRTQGTTSGTTNQSRLLFSQAGPQSMSLQARNWLPGPCYRQQRLSKTANDNNNSNFPWTAASKYHLNGRDSLVNPGPAMASHKDDEEKFFPMHGNLIFGKEGTTASNAELDNVMITDEEEIRTTNPVATVQYGTVANNLQSSNTAPTTRTVNDQGALPGMVWQDRDVYLQGPIWAKIPHTDGHFHPSPLMGGFGLKHPPPQIMIKNTPVPANPPTTFSPAKFASFITQYSTGQVSVEIEWELQKENSKRWNPEIQYTSNYNKSVNVDFTVDTNGVYSEPRPIGTRYLTRNL

SEQ ID NO: 831 - protein, 735 aa, Artificial Sequence
  Synthetic polypeptide
MAADGYLPDWLEDNLSEGIREWWALKPGVPQPKANQQHQDNRRGLVLPGYKYLGPGNGLDKGEPVNEADAAALEHDKAYDQQLKAGDNPYLKYNHADAEFQERLQEDTSFGGNLGRAVFQAKKGILEPLGLVEEAAKTAPGKKRPVDQSPQEPDSSSGVGKSGKQPARKRLNFGQTGDSESVPDPQPLGEPPAAPTSLGSNTMASGGGAPMADNNEGADGVGNSSGNWHCDSQWLGDRVITTSTRTWALPTYNNHLYKQISSQSGASNDNHYFGYSTPWGYFDFNRFHCHFSPRDWQRLINNNWGFRPKKLSFKLFNIQVKEVTQNDGTTTIANNLTSTVQVFTDSEYQLPYVFGSAHQGCLPPFPADVFMVPQYGYLTLNNGSQAVGRSSFYCLEYFPSQMLRTGNNFQFSYTFEDVPFHSSYAHSQSSDRLMNPLIDQYLYYLNRTQGTTSGTTNQSRLLFSQAGPQSMSLQARNWLPGPCYRQQRLSKTANDNNNSNFPTAASKYHLNGRDSLVNPGPAMASHKDDEEKFFPMHGNLIFGKEGTTASNAELDNVMITDEEEIRTTNPVATEQYGTVANNLQSSNTAPTTRTVNDQGALPGMVWQDRDVYLQGPIWAKIPHTDGHFHPSPLMGGFGLKHPPPQIMIKNTPVPANPPTTFSPAKFASFITQYSTGQVSVEIEWELQKENSKRWNPEIQYTSNYNKSVNVDFTVDTNGVYSEPRPIGTRYLTRNL

SEQ ID NO: 832 - protein, 736 aa, Artificial Sequence
  Synthetic polypeptide
MAADGYLPDWLEDNLSEGIREWWALKPGVPQPKANQQHQDNRRGLVLPGYKYLGPGNGLDEGEPVNEADAAALEHDKAYDQQLKAGDNPYLKYNHADAEFQERLQEDTSFGGNLGRAVFQAKKRILEPLGLVEGAAKTAPGKKRPVDQSPQEPDSSSGVGKSGKQPARKRLNFGQTGDSESVPDPQPLGEPPAAPTSLGSNTMASGGGAPMADNNEGADGVGNSSGNWHCDSQWLGDRVITTSTRTWALPTYNSHLYKQISSQSGASNDNHYFGYSTPWGYFDFNRFHCHFSPRDWQRLINNNWGFRPKKLSFKLFNIQVKEVTQNDGTTTIANNLTSTVQVFTDSEYQLPYVLGSAHQGCLPPFPADVFMVPQYGYLTLNNGSQAVGRSSFYCLEYFPSQMLRTGNNFQFSYTFEDVPFHSSYAHSQSLDRLMNPLIDQYLYYLNRTQGTTSGTTNQSRLLFSQAGPQSMSLQARNWLPGPCYRQQRLSKTANDNNNSNFPWTAASKYHLNGRDSLVNPGPAMASHKDDEEKFFPMHGNLIFGKEGTTASNAELDNVMITDEEEIRTTNPVATEQYGTVANNLQSSNTAPTTRTVNDQGALPGMVWQDRDVYLQGPIWAKIPHTDGHFHPSPLMGGFGLKHPPPQIMIKNTPVPANPPTTFSPAKFASFITQYSTGQVSVEIEWELQKENSKRWNPEIQYTSNYNKSVNVDFTVDTNGVYSEPRPIGTRYLTRNL

SEQ ID NO: 833 - protein, 668 aa, Artificial Sequence
  Synthetic polypeptide
MAADGYLPDWLEDNLSEGIREWWALKPGVPQPKANQQHQDNRRGLVLPGYKYLGPGNGLDKGEPVNEADAAALEHDKAYDQQLKAGDNPYLKYNHADAEFQERLQEDTSFGGNLGRAVFQAKKRILEPLGLVEGAAKTAPGKKRPVDQSPQEPDSSSGVGKSGKQPARKRLNFGQTGDSESVPDPQPLGEPPAAPTSLGSNTMASGGGAPMADNNEGADGVGNSSGNWHCDSQWLGDRVITTSTRTWALPTYNSHLYKQISSQSGASNDNHYFGYSTPWGILTLTDSTATSHHVTGSDSLTTTGDSGPRNSASSSSTSKLKRSRRTMARRLLPITLPARFKCLRTRSISSRTCSGRRTKAVSRRFQRTPSWSLSMDTSPTTEVKRWDAHPFTAWSTSLRRCGLEITSNSAIPSRMYLFTAATLTARVWIAILLLISICTTTERKEQPLEQPTNHGCFLARLGLSLCLCRPEIGYLGPATGNRDFQRLLTTTTTVTFLGQRPANIISMAATRWIQDQLWPVTRTMKKNFSLCTAIRGPYLAWCGKIVTCTFKDLSGQRFLTRMDTFILLLWEALDNIRLLKSSKILRYRQILRRLSARPSLLHLSLSTPLDRSAWKLSGSYRKKTANVGIQRFSTLPTTTSLLMWTLLTLMVFIVNLALLEPGISHETC

SEQ ID NO: 834 - protein, 734 aa, Artificial Sequence
  Synthetic polypeptide
MTDGYLPDWLEDNLSEGVREWWALQPGAPKPKANQQHQDNARGLVLPGYKYLGPGNGLDKGEPVNAADAAALEHDKAYDQQLKAGDNPYLKYNHADAEFQQRLQGDTSFGGNLGRAVFQAKKRVLEPLGLVEQAGETAPGKKRPLIESPQQPDSSTGIGKKGKQPAKKKLVFEDETGAGDGPPEGSTSGAMSDDSEMRAATGGAAVEGGQGADGVGNASGDWHCDSTWSEGHVTTTSTRTWVLPTYNNHLYKRLGESLQSNTYNGFSTPWGYFDFNRFHCHFSPRDWQRLINNNWGMRPKAMRVKIFNIQVKEVTTSNGETTVANNLTSTVQIFADSSYELPYVMDAGQEGSLPPFPNDVFMVPQYGYCGLVTGNTSQQQTDRNAFYCLEYFPSQMLRTGNNFEITYSFEKVPFHSMYAHSQSLDRLMNPLIDQYLWGLQSTTTGTTLNAGTATTNFTKLRPTNLSNFKKNWLPGPSIKQQGFSKTANQNYKIPATGSDSLIKYETHSTLDGRWSALTPGPPMATAGPADSKFSNSQLIFAGPKQNGNTATVPGTLIFTSEEELAATNATDTDMWGNLPGGDQSNSNLPTVDRLTALGAVPGMVWQNRDIYYQGPIWAKIPHTDGHFHPSPLIGGFGLKHPPPQIFIKNTPVPANPATTFSSTPVNSFITQYSTGQVSVQIDWEIQKERSKRWNPEVQFTSNYGQQNSLLWAPDAAGKYTEPRAIGTRYLTHHL

SEQ ID NO: 835 - protein, 734 aa, Artificial Sequence
  Synthetic polypeptide
MTDGYLPDWLEDNLSEGVREWWALQPGAPKPKANQQHQDNARGLVLPGYKYLGPGNGLDKGEPVNAADAAALEHDKAYDQQLKAGDNPYLKYNHADAEFQQRLQGDTSFGGNLGRAVFQAKKRVLEPLGLVEQAGETAPGKKRPLIESPQQPDSSTGIGKKGKQPAKKKLVFEDETGAGDGPPEGSTSGAMSDDSEMRAAAGGAAVEGGQGADGVGNASGDWHCDSTWSEGHVTTTSTRTWVLPTYNNHLYKRLGESLQSNTYNGFSTPWGYFDFNRFHCHFLPRDWQRLINNNWGVRPKAMRVKIFNIQVKEVTTSNGETTVANNLTSTVQIFADSSYELPYVMDAGQEGSLPPFPNDVFMVPQYGYCGLVTGDTSQQQTDRNAFYCLEYFPSQMLRTGNNFEITYSFEKVPFHSMYAHSQSLDRLMNPLIDQYLWGLQSTTTGTTLNAGTATTNFTKLRPTNFSNFKKNWLPGPSIKQQGFSKTANQNYKIPATGSDSLIKYETHSTLDGRWSALTPGPPMATAGPADSKFSNSQLIFAGPKQNGNTATVPGTLIFTSEEELAATNATDTDMWGNLPGGDQSNSNLPTVDRLTALGAVPGMVWQNRDIYYQGPIWAKIPHTDGHFHPSPLIGGFGLKHPPPQIFIKNTPVPANPATTFSSTPVNSFITQYSTGQVSVQIDWEIQKERSKRWNPEVQFTSNYGQQNSLLWAPDAAGKYTEPRAIGTRYLTHHL

SEQ ID NO: 836 - protein, 734 aa, Artificial Sequence
  Synthetic polypeptide
MTDGYLPDWLEDNLSEGVREWWALQPGAPKPKANQQHQDNARGLVLPGYKYLGPGNGLDEGEPVNAADAAALEHDKAYDQQLKAGDNPYLKYNHADAEFQQRLQGDTSFGGNLGRAVFQAKKRVLEPLGLVEQAGETAPGKKRPLIESPQQPDSSTGIGKKGKQPAKKKLVFEDETGAGDGPPEGSTSGAMSDDSEMRAAAGGAAVEGGQGADGVGNASGDWHCDSTWSEGHVTTTSTRTWVLPTYNNHLYKRLGESLQSNTYNGFSTPWGYFDFNRFHCHFSPRDWQRLINNNWGMRPKAMRVKIFNIQVKEVTTSNGETTVANNLTSTVQIFADSSYELPYVMDAGQEGSLPPFPNDVFMVPQYGYCGLVTGNTSQQQTDRNAFYCLEYFPSQMLRTGNNFEITYSFEKVPFHSMYAHSQSLDRLMNPLIDQYLWGLQSTTTGTTLNAGTATTNFTKLRPTNFSNFKKNWLPGPSIKQQGFSKTANQNYKIPATGSDSLIKYETHSTLDGRWSALTPGPPMATAGPADSKFSNSQLIFAGPKQNGNTATVPGTLIFTSEEELAATNATDTDMWGNLPGGDQSNSNLPTVDRLTALGAVPGMVWQNRDIYYQGPIWAKIPHTDGHFHPSPLIGGFGLKHPPPQIFIKNTPVPANPATTFSSTPVNSFITQYSTGQVSVQIDWEIQKERSKRWNPEVQFTSNYGQQNSLLWAPDAAGKYTEPRAIGTRYLTHHL

SEQ ID NO: 837 - protein, 734 aa, Artificial Sequence
  Synthetic polypeptide
MTDGYLPDWLEDNLSEGVREWWALQPGAPKPKANQQHQDNARGLVLPGYKYLGPGNGLDKGEPVNAADAAALEHDKAYDQQLKAGDNPYLKYNHADAEFQQRLQGDTSFGGNLGRAVFQAKKRVLEPLGLVEQAGETAPGKKRPLIESPQQPDSSTGIGKKGKQPAKKKLVFEDGTGAGDGPPEGSTSGAMSDDSEMRAAAGGAAVEGGQGADGVGNASGDWHCDSTWSEGHVTTTSTRTWVLPTYNNHLYKRLGESLQSNTYNGFPTPWGYFDFNRFHCHFSPRDWQRLINNNWGMRPKAMRVKIFNIQVKEVTTSNGETTAANNLTSTVQIFADSSYELPYVMDAGQEGSLPPFPNDVFMVPQYGYCGLVTGNTSQQQTDRNAFYCLEYFPSQMLRTGNNFEITYSFEKVPFHSMYAHSQSLDRLMNPLIDQYLWGLQSTTTGTTLNAGTATTNFTKLRPTNFSNFKKNWLPGPSIKQQGFSKTANQNYKIPATGSDSLIKYETHSTLDGRWSALTPGPPMATAGPADSKFSNSQLIFAGPKQNGNTATVPGTLIFTSEEELAATNATDTDMWGNLPGGDQSNSNLPTVDRLTALGAVPGMVWQNRDIYYQGPIWAKIPHTDGHFHPSPLIGGFGLKHPPPQIFIKNTPVPANPATTFSSTPVNSFITQYSTGQVSVQIDWEIQKERSKRWNPEVQFTSNYGQQNSLLWAPDAAGKYTEPRAIGTRYLTHHL

SEQ ID NO: 838 - protein, 734 aa, Artificial Sequence
  Synthetic polypeptide
MTDGYLPDWLEDNLSEGVREWWALQPGAPKPKANQQHQDNARGLVLPGYKYLGPGNGLDKGEPVNAADAAALEHDKAYDQQLKAGDNPYLKYNHADAEFQQRLQGDTSFGGNLGRAVFQAKKRVLEPLGLVEQAGETAPGKKRPLIESPQQPDSSTGIGKKGKQPAKKKLVFEDETGAGDGPPEGSTSGAMSDDSEMRAAAGGAAVEGGQGADGVGNASGDWHCDSTWSEGHVTTTSTRTWVLPTYNNHLYKRLGESLQSNTYNGFSTPWGYFDFNRFHCHFSPRDWQRLINNNWGMRPKAMRVKIFNIQVKEVTTSNGETTVANNLTSTVQIFADSSYELPYVMDAGQEGSLPPFPNDVFMVPQYGYRGLVTGNTSQQQTDRNAFYCLEYFPSQMLRTGNNFEITYSFEKVPFHSMYAHSQSLDRLMNPLIDQYLWGLQSTTTGTTLNAGTATTNFTKLRPTNFSNFKKNWLPGPSIKQQGFSKTANQNYKIPATGSDSLIKYETHSTLDGRWSALTPGPPMATAGPADSKFSNSQLIFAGPKQNGNTATVPGTLIFTSEEELAATNATDTDMWGNLPGGDQSNSNLPTVDRLTALGAVPGMVWQNRDIYYQGPIWAKIPHTDGHFHPSPLIGGFGLKHPPPQIFIKNTPVPANPATTFSSTPVNSFITQYSTGQVSVQIDWEIQKERSKRWNPEVQFTSNYGQQNSLLWAPDAAGKYTEPRAIGTRYLTHHL

SEQ ID NO: 839 - protein, 734 aa, Artificial Sequence
  Synthetic polypeptide
MTDGYLPDWLEDNLSEGVREWWALQPGAPKPKANQQHQDNARGLVLQGYKYLGPGNGLDKGEPVNAADAAALEHDKAYDQQLKAGDNPYLKYNHADAEFQQRLQGDTSFGGNLGRAVFQAKKRVLEPLGLVEQAGETAPGKKRPLIESPQQPDSSTGIGKKGKQPAKKKLVFEDETGAGDGPPEGSTSGAMSDDSEMRAAAGGAAVEGGQGADGVGNASGDWHCDSTRSEGHVTTTSTRTWVLPTYNNHLYKRLGESLQSNTYNGFSTPWGYFDFNRFHCHFSPRDWQRLINNNWGMRPKAMRVKIFNIQVKEVTTSNGETTVANNLTSTVQIFADSSYELPYVMDAGQEGSLPPFPNDVFMVPQYGYCGLVTGNTSQQQTDRNAFYCLEYFPSQMLRTGNNFEITYSFEKVPFHSMYAHSQSLDRLMNPLIDQYLWGLQSTTTGTTLNAGTATTNFTKLRPTNFSNFKKNWLPGPSIKQQGFSKTANQNYKIPATGSDSLIKYETHSTLDGRWSARTPGPPMATAGPADSKFSNSQLIFAGPKQNGNTATVPGTLIFTSEEELAATNATDTDMWGNLPGGDQSNSNLPTVDRLTALGAVPGMVWQNRDIYYQGPIWAKIPHTDGHFHPSPLIGGFGLKHPPPQIFIKNTPVPANPATTFSSTPVNSFITQYSTGQVSVQIDWEIQKERSKRWNPEVQFTSNYGQQNSLLWAPDAAGKYTEPRAIGTRYLTHHL

SEQ ID NO: 840 - protein, 724 aa, Artificial Sequence
  Synthetic polypeptide
MSFVDHPPDWLEEVGEGLREFLGLEAGPPKPKPNQQHQDQARGLVLPGYNYLGPGNGLDRGEPVNRADEVAREHDISYNEQLEAGDNPYLKYNHADAEFQERLADDTSFGGNLGKAVFQAKKRVLEPFGLVEEGAKTAPTGKRIDDHFPKRKKARTEEDSKPSTSSDAEAGPSGSQQLQIPAQPASSLGADTMSAGGGGPLGDNNQGADGVGNASGDWHCDSTWMGDRVVTKSTRTWVLPSYNNHQYREIKSGSVDGSNANAYFGYSTPWGYFDFNRFHSHWSPRDWQRLINNYWGFRPRSLRVKIFNIQVKEVTVQDSTTTIANNLTSTVQVFTDDDYQLPYVVGNGTEGCLPAFPPQVFTLPQYGYATLNRDNTENPTERSSFFCLEYFPSKMLRTGNNFEFTYNFEEVPFHSSFAPSQNLFKLANPLVDQYLYRFVSTNNTGGVQFNKNLAGRYANTYKNWFPGPMGRTQGWNLGSGVNRASVSAFATTNRMELEGASYQVPPQPNGMTNNLQGSNTYALENTMIFNSQPANPGTTATYLEGNMLITSESETQPVNRVAYNVGGQMATNNQSSTTAPATGTYNLQEIVPGSVWMERDVYLQGPIWAKIPETEAHFHPSPAMGGFGLKHPPPMMLIKNTPVPGNITSFSDVPVSSFITQYSTGQVTVEMEWELKKENSKRWNPEIQYTNNYNDPQFVDFAPDSTGEYRTTRPIGTRYLTRPL

SEQ ID NO: 841 - protein, 724 aa, Artificial Sequence
  Synthetic polypeptide
MSFVDHPPDWLEEVGEGLREFLGLEAGPPKPKPNQQHQDQARGLVLPGYNYLGPGNGLDRGEPVNRADEVAREHDISYNEQLEAGDNPYLKYNHADAEFQEKLADDTSSGGNLGKAVFQAKKRVLEPFGLVEEGAKTAPTGKRIDDHFPKRKKARTEEDSKPSTSSDAEAGPSGSQQLQIPAQPASSLGADTMSAGGGGPLGDNNQGADGVGNASGDWHCDSTWMGDRVVTKSTRTWVLPSYNNHQYREIKSGSVDGSNANAYFGYSTPWGYFDFNRFHSHWSPRDWQRLINNYWGFRPRSLRVKIFNIQVKEVTVQDSTTTIANNLTSTVQVFTDDDYQLPYVVGNGTEGCLPAFPPQVFTLPQYGYATLNRDNTENPTERSSFFCLEYFPSKMLRTGNNFEFTYNFEEVPFHSSFAPSQNLFKLANPLVDQYLYRFVSTNNTGGVQFNKNLAGRYANTYKNWFPGPMGRTQGWNLGSGVNRASVSAFATTNRMELEGASYQVPPQPNGMTNNLQGSNTYALENTMIFNSQPANPGTTATYLEGNMLITSESETQPVNRVAYNVGGQMATNNQSSTTAPATGTYNLQEIVPGSVWMERDVYLQGPIWAKIPETGAHFHPSPAMGGFGLKHPPPMMLIKNTPVPGNITSFSDVPVSSFITQYSTGQVTVEMEWELKKENSKRWNPEIQYTNNYNDPQFVDFAPDSTGEYRTTRPIGTRYLTRPL

SEQ ID NO: 842 - protein, 724 aa, Artificial Sequence
  Synthetic polypeptide
MSFVDHPPDWLEEVGEGLREFLGLEAGPPKPKPNQQHQDQARGLVLPGYNYLGPGNGLDRGEPVNRADEVAREHDISYNEQLEAGDNPYLKYNHADAEFQEKLADDTSFGGNLGKAVFQAKKRVLEPFGLVEEGAKTAPTGKRIDDHFPKRKKARTEEDSKPSTSSDAEAGPSGSQQLQIPAQPASSLGADTMSAGGGGPLGDNNQGADGVGNASGDWHCDSTWMGDRVVTKSTRTWVLPSYNNHQYREIKSGSVDGSNANAYFGYSTPWGYFDFNRFHSHWSPRDWQRLINNYWGFRPRSLRVKIFNIQVKEVTVQDSTTTIANNLTSTVQVFTDDDYQLPYVVGNGTEGCLPAFPPQVFTLPQYGYATLNRDNTENPTERSSFFCLEYFPSKMLRTGNNFEFTYNFEEVPFHSSFAPSQNLFKLANPLVDQYLYRFVSTNNTGGVQFNKNLAGRYANTYKNWFPGPMGRTQGWNLGSGVNRASVSAFATTNRMELEGASYQVPPQPNGMTNNLQGSNTYALENTMIFNSQPANPGTTATYLEGNMLITSESETQPVNRVAYNVGGQMATNNQSSTTAPATGTYNLQEIVPGSVWMERDVYLQGPIWAKIPETGAHFHPSPAMGGFGLKHPPPMMLIKSTPVPGNITSFSDVPVSSFITQYSTGQVTVEMEWELKKENSKRWNPEIQYTNNYNDPQFVDFAPDSTGEYRTTRPIGTRYLTRPL

SEQ ID NO: 843 - protein, 724 aa, Artificial Sequence
  Synthetic polypeptide
MSFVDHPPDWLEEVGEGLREFLGPEAGPPKPKPNQQHQDQARGLVLPGYNYLGPGNGLDRGEPVNRADEVAREHDISYNEQLEAGDNPYLKYNHADAEFQEKLADDTSFGGNLGKAVFQAKKRVLEPFGLVEEGAKTAPTGKRIDDHFPKRKKVRTEEDSKPSTSSDAEAGPSGSQQLQIPAQPASSLGADTMSAGGGGPLGDNNQGADGVGNASGDWHCDSTWMGDRVVTKSTRTWVPPSYNNHQYREIKSGSVDGSNANAYFGYSTPWGYFDFNRFHSHWSPRDWQRLINNYWGFRPRSLRVKIFNIQVKEVTVQDSTTTIANNLTSTVQVFTDDDYQLPYVVGNGTEGCLPAFPPQVFTLPQYGYATLNRDNTENPTERSSFFCLEYFPSKMLRTGNNFEFTYNFEEVPFHSSFAPSQNLFKLANPLVDQYLYRFVSTNNTGGVQFNKNLAGRYANTYKNWFPGPMGRTQGWNLGSGVNRASVSAFATTNRMELEGASYQVPPQPNGMTNNLQGSNTYALENTMIFNSQPANPGTTATYLEGNMLITSESETQPVNRVACNVGGQMATNNQSSTTAPATGTYNLQEIVPGSVWMERDVYLQGPIWAKIPETGAHFHPSPAMGGFGLKHPPPMMLIKNTPVPGNITSFSDVPVSSFITQYSTGQVTVEMEWELKKENSKRWNPEIQYTNNYNDPQFVDFAPDSTGEYRTTRPIGTRYLTRPL

SEQ ID NO: 844 - protein, 724 aa, Artificial Sequence
  Synthetic polypeptide
MSFVDHPPDWLEEVGEGLREFLGLEAGPPKPKPNQQHQDQARGLVLPGYNYLGPGNGLDRGEPVNRADEVAREHDISYNEQLEAGDNPYLKYNHADAEFQEKLADDTSFGGNLGKAVFQAKKRVLEPFGLVEEGAKTAPTGKRIDDHFPKRKKARTEEDSKPSTSSDAEAGPSGSQQLQIPAQPASSLGADTMSAGGGGPLGDNNQGADGVGNASGDWHCDSTWMGDRVVTKSTRTWVLPSYNNHQYREIKSGSVDGSNANAYFGYSTPWGYFDFNRFHSHWSPRDWQRLINNYWGFRPRSLRVKIFNIQVKEVTVQDSTTTIANNLTSTVQVFTDDDYQLPYVVGNGTEGCLPAFPPQVFTLPQYGYATLNRDNTENPTERSSFFCLEYFPSKMLRTGNNFEFTYNFEEVPFHSSFAPSQNLFKLANPLVDQYLYRFVSTNNTGGVQFNKNLAGRYANTYKNWFPGPMGRTQGWNLGSGVNRASVSAFATTNRMELEGASYQVPPQPNGMTNNLQGSNTYALENTMIFNSQPANPGTTATYLEGNMLITSESETQPVNRVAYNVGGQMATNNQSSTTAPATGAYNLQEIVPGSVWMERDVYLQGPIWAKIPETGAHFHPSPAMGGFGLKHPPPMMLIKNTPVPGNITSFSDVPVSSFITQYSTGQVTVEMEWELKKENSKRWNPEIQYTNNYNDPQFVDFAPDSTGEYRTTRPIGTRYLTRPL

SEQ ID NO: 845 - protein, 724 aa, Artificial Sequence
  Synthetic polypeptide
MSFVDHPPDWLEEVGEGLREFLGLEAGPPKPKPNQQHQDQARGLVLPGYNYLGPGNGLDRGEPVNRADGVAREHDISYNEQLEAGDNPYLKYNHADAEFQEKLADDTSFGGNLGKAVFQAKKRVLEPFGLVEEGAKTAPTGKRIDDHFPKRKKARTEEDSKPSTSSDAEAGPSGSQQLQIPAQPASSLGADTMSAGGGGPLGDNNQGADGVGNASGDWHCDSTWMGDRVVTKSTRTWVLPSYNNHQYREIKSGSVDGSNANAYFGYSTPWGYFDFNRFHSHWSPRDWQRLINNYWGFRPRSLRVKIFNIQVKEVTVQDSTTTIANNLTSTVQAFTDDDYQLPYVVGNGTEGCLPAFPPQVFTLPQYGYATLNRDNTENPTERSSFFCLEYFPSKMLRTGNNFEFTYNFEEVPFHSSFAPSQNLFKLANPLVDQYLYRFVSTNNTGGVQFNKNLAGRYANTYKNWFPGPMGRTQGWNLGSGVNRASVSAFATTNRMELEGASYQVPPQPNGMTNNLQGSNTYALENTMIFNSQPANPGTTATYLEGNMLITSESETQPVNRVAYNVGGQMATNNQSSTTAPATGTYNLQEIVPGSVWMERDVYLQGPIWAKIPETGAHFHPSPAMGGFGLKHPPPMMLIKNTPVPGNITSFSDVPVSSFITQYSTGQVTVEMEWELKKENSKRWNPEIQYTNNYNDPQFVDFAPDSTGEYRTTRPIGTRYLTRPL

SEQ ID NO: 846 - protein, 723 aa, Artificial Sequence
  Synthetic polypeptide
MSFVDHPPDWLEEVGEGLREFLGLEAGPPKPKPNQQHQDQARGLVLPGYNYLGPGNGLDRGEPVNRADEVAREHDISYNEQLEAGDNPYLKYNHADAEFQEKLADDTSFGGNLGKAVFQAKKRVLEPFGLVEEGAKTAPTGKRIDDHFPKRKKARTEEDSKPSTSSDAEAGPSGSQQLQIPAQPASSLGADTMSAGGGGPLGDNNQGADGVGNASGDWHCDSTWMGDRVVTKSTRTWVLPSYNNHQYREIKSGSVDGSNANAYFGYSTPWGYFDFNRFHSHWSPRDWQRLINNYWGFRPRSLRVKIFNIQVKEVTVQDSTTTIANNLTSTVQVFTDDDYQLPYVVGNGTEGCLPAFPPQVFTLPQYGYATLNRDNTENPTERSSFFCLEYFPSKMLRTGNNFEFTYNFEEVPFHSSFAPSQNLFKLANPLVDQYLYRFVSTNNTGGVQFNKNLAGRYANTYKNWFPGPMGRTQGWNLGSGVNRASVSAFATTNRMELEGASYVPPQPNGMTNNLQGSNTYALENTMIFNSQPANPGTTATYLEGNMLITSESETQPVNRVAYNVGGQMATNNQSSTTAPATGTYNLQEIVPGSVWMEGDVYLQGPIWAKIPETGAHFHPSPAMGGFGLKHPPPMMLIKNTPVPGNITSFSDVPVSSFITQYSTGQVTVEMEWELKKENSKRWNPEIQYTNNYNDPQFVDFAPDSTGEYRTTRPIGTRYLTRPL

SEQ ID NO: 847 - protein, 724 aa, Artificial Sequence
  Synthetic polypeptide
MSFVDHPPDWLEEVGEGLREFLGLEAGPPKPKPNQQHQDQARGLVLPGYNYLGPGNGLDRGEPVNRADEVAREHDISYNEQLEAGDNPYLKYNHADAEFQEKLADDTSFGGNLGKAVFQAKKRVLEPFGLVEEGAKTAPTGKRIDDHFPKRKKVRTEEDSKPSTSSDAEAGPSGSQQLQIPAQPASSLGADTMSAGGGGPLGDNNQGADGVGNASGDWHCDSTWMGDRVVTKSTRTWVLPSYNNHQYREIKSGSVDGSNANAYFGYSTPWGYFDFNRFHSHWSPRDWQRLINNYWGFRPRSLRVKIFNIQVKEVTVQDSTTTIANNLTSTVQVFTDDDYQLPYVVGNGTEGCLPAFPPQVFTLPQYGYATLNRDNTENPTERSSFFCLEYFPSKMLRTGNNFEFTYNFEEVPFHSSFAPSQNLFKLANPLVDQYLYRFVSTNNTGGVQFNKNLAGRYANTYKNWFPGPMGRTQGWNLGSGVNRASVSAFATTNRMELEGASYQVPPQPNGMTNNLQGSNTYALENTMIFNSQPANPGTTATYLEGNMLITSESETQPVNRVAYNVGGQMATNNQSSTTAPATGTYNLQEIVPGSVWMERDVYLQGPIWAKIPETGAHFHPSPAMGGFGLKHPPPMMLIKNTPVPGNITSFSDVPVSSFITQYSTGQVTVEMEWELKKENSERWNPEIQYTNNYNDPQFVDFAPDSTGEYRTTRPIGTRYLTRPL

SEQ ID NO: 848 - protein, 724 aa, Artificial Sequence
  Synthetic polypeptide
MSFVDHPPDWLEEVGEGLREFLGLEAGPPKPKPNQQHQDQARGLVLPGYNYLGPGNGLDRGEPVNRADEVAREHDISYSEQLEAGDNPYLKYNHADAEFQEKLADDTSFGGNLGKAVFQAKKRVLEPFGLVEEGAKTAPTGKRIDDHFPKRKKARTEEDSKPSTSSDAEAGPSGSQQLQIPAQPASSLGADTMSAGGGGPLGDNNQGADGVGNASGDWHCDSTWMGDRVVTKSTRTWVLPSYNNHQYREIKSGSVDGSNANAYFGYSTPWGYFDFNRFHSHWSPRDWQRLINNYWGFRPRSLRVKIFNIQVKEVTVQDSTTTIANNLTSTVQVFTDDDYQLPYVVGNGTEGCLPAFPPQVFTLPQYGYATLNRDNTENPTERSSFFCLEYFPSKMLRTGNNFEFTYNFEEVPFHSSFAPSQNLFKLANPLVDQYLYRFVSTNNTGGVQFNKNLAGRYANTYKNWFPGPMGRTQGWNLGSGVNRASVSAFATTNRMELEGASYQVPPQPNGMTNNLQGSNTYALENTMIFNSQPANPGTTATYLEGNMLITSESETQPVNRVAYNVGGQMATNNQSSTTAPATGTYNLQEIVPGSVWMERDVYLQGPIWAKIPETGAHFHPSPAMGGFGLKHPPPMMLIKNTPVPGNITSFSDVPVSSFITQYSTGQVTVEMEWELKKENSKRWNPEIQYTNNYNDPQFVDFAPDSTGEYRTARPIGTRYLTRPL

SEQ ID NO: 849 - protein, 724 aa, Artificial Sequence
  Synthetic polypeptide
MSFVDHPPDWLEEVGEGLREFLGPEAGPPKPKPNQQHQDQARGLVLPGYNYLGPGNGLDRGEPVNRADEVAREHDISYNEQLEAGDNPYLKYNHADAEFQEKLADDTSFGGNLGKAVFQAKKRVLEPFGLVEEGAKTAPTGKRIDDHFPKRKKARTEEDSKPSTSSDAEAGPSGSQQLQIPAQPASSLGADTMSAGGGGPLGDNNQGADGVGNASGDWHCDSTWMGDRVVTKSTRTWVLPSYNNHQYREIKSGSVDGSNANAYFGYSTPWGYFDFNRFHSHWSPRDWQRLINNYWGFRPRSLRVKIFNIQVKEVTVQDSTTTIANNLTSTVQVFTDDDYQLPYVVGNGTEGCLPAFPPQVFTLPQYGYATLNRDNTENPTERSSFFCLEYFPSKMLRTGNNFEFTYNFEEVPFHSSFAPSQNLFKLANPLVDQYLYRFVSTNNTGGVQFNKNLAGRYANTYKNWFPGPMGRTQGWNLGSGVNRASVSAFATTNRMELEGASYQVPPQPNGMTNNLQGSNTYALENTMIFNSQPANPGTTATYLEGNMLITSESETQPVNRVAYNVGGQMTTNNQSSTTAPATGTYNLQEIVPGSVWMERDVYPQGPIWAKIPETGAHFHPSPAMGGFGLKHPPPMMLIKNTPVPGNITSFSDVPVSSFITQYSTGQVTVEMEWELKKENSKRWNPEIQYTNNYNDPQFVDFAPDSTGEYRTTRPIGTRYLTRPL

SEQ ID NO: 850 - protein, 724 aa, Artificial Sequence
  Synthetic polypeptide
MSFVDHPPDWLEEVGEGLREFLGLEAGPPKPKPNQQHQDQARGLVLPGYNYLGPGNGLDRGEPVNRADEVAREHDISYNEQLEAGDNPYLKYNHADAEFQEKLADDTSFGGNLGKAVFQAKKRVLEPFGLVEEGAKTAPTGKRIDDHFPKRKKARTEEDSKPSTSSDAEAGPSGSQQLQIPAQPASSLGADTMSAGGGGPLGDNNQGADGVGNASGDWHCDSTWMGDRVVTKSTRTWVLPSYNNHQYREIKSGSVDGSNANAYFGYSTPWGYFDFNRFHSHWSPRDWQRLINNYWGFRPRSLRVKIFNIQVKEVTVQDSTTTIANNLTSTVQVFTDDDYQLPYVVGNGTEGCLPAFPPQVFTLPQYGYATLNRDNTENPTERSSFLCLEYFPSKMLRTGNNFEFTYNFEEVPFHSSFAPSQNLFKLANPLVDQYLYRFVSTNNTGGVQFNKNLAGRYANTYKNWFPGPMGRTQGWNLGSGVNRASVSAFATTNRMELEGASYQVPPQPNGMTNNLQGSNTYALENTMIFNSQPANPGTTATYLEGNMLITSESETQPVNRVAYNVGGQMATNNQSSTTAPATGTYNLQEIVPGSVWMKRDVYLQGPIWAKIPETGAHFHPSPAMGGFGLKHPPPMMLIKNTPVPGNITSFSDVPVSSFITQYSTGQVTVEMEWELKKENSKRWNPEIQYTNNYNDPQFVDFAPDSTGEYRTTRPIGTRYLTRPL

SEQ ID NO: 851 - protein, 724 aa, Artificial Sequence
  Synthetic polypeptide
MSFVDHPPDWLEEVGEGLREFLGLEAGPPKPKPNQQHQDQARGLVLPGYNYLGPGNGLDRGEPVNRADEVAREHDISYNEQLEAGDNPYLKYNHADAEFQEKLADDTSFGGNLGKAVFQAKKRVLEPFGLVEEGAKTAPTGKRIDDHFPKRKKARTEEDSKPSTPSDAEAGPSGSQQLQIPAQPASSLGADTMSAGGGGPLGDNNQGADGVGNASGDWHCDSTWMGDRVVTKSTRTWVLPSYNNHQYREIKSGSVDGSNANAYFGYSTPWGYFDFNRFHSHWSPRDWQRLINNYWGFRPRSLRVKIFNIQVKEVTVQDSTTTIANNLTSTVQVFTDDDYQLPYVVGNGTEGCLPAFPPQVFTLPQYGYATLNRDNTENPTERSSFFCLEYFPSKMLRTGNNFEFTYNFEEVPFHSSFAPSQNLFKLANPLVDQYLYRFVSTNNTGGVQFNKNLAGRYANTYKNWFPGPMGRTQGWNLGSGVNRASVSAFATTNRMELEGASYQVPPQPNGMTNNLQGSNTYALENTMIFNSQPANPGTTATYLEGNMLITSESETQPVNRVAYNVGGQMATNNQSSTTAPATGTYNLQEIVPGSVWMERDVYLQGPIWAKIPETGAHFHPSPAMGGFGLKHPPPMMLIKNTPVPGNITSFSDVPVSSFITQYSTGQVTVEMEWELKKENSKRWNPEIQYTNNYNDPQFVDFAPDSTGEYRTTRPIGTRYLTRPL

SEQ ID NO: 852 - protein, 724 aa, Artificial Sequence
  Synthetic polypeptide
MSFVDHPPDWLEEVGEGLREFLGLEAGPPKPKPNQQHQDQARGLVLPGYNYLGPGNGLDRGEPVNRADEVAREHDISYNEQLEAGDNPYLKYNHADAEFQEKLADDTSFGGNLGKAVFQAKKRVLEPFGLVEEGAKTAPTGKRIDDHFPKRKKARTEEDSKPSTSSDAEAGPSGSQQLQIPAQPASSLGADTMSAGGGGPLGDNNQGADGVGNASGDWHCDSTWMGDRVVTKSTRTWVLPSYNNHQYREIKSGSVDGSNANAYFGYSTPWGYFDFNRFHSHWSPRDWQRLINNYWGFRPRSLRVKIFNIQVKEVTVQDSTTTIANNLTSTVQVFTDDDYQLPYVVGNGTEGCLPAFPPQVFTLPQYGYATLNRDNTENPTERSSFFCLEYFPSKMLRTGNNFEFTYNFEEVPFHSSFAPSQNLFKLANPLVDQYLYRFVSTNNTGGVQFNKNLAGRYANTHKNWFPGPMGRTQGWNLGSGVNRASVSAFATTNRMELEGASYQVPPQSNGMTNNLRGSNTYALENTMIFNSQPANPGTTATYLEGNMLITSESETQPVNRVAYNVGGQMATNNQSSTTAPATGTYNLQEIVPGSVWMERDVYLQGPIWAKIPETGAHFHPSPAMGGFGLKHPPPMMLIKNTPVPGNITSFSDVPVSSFITQYSTGQVTVEMEWELKKENSKRWNPEIQYTNNYNDPQFVDFAPDSTGEYRTTRPIGTRYLTRPL

SEQ ID NO: 853 - protein, 724 aa, Artificial Sequence
  Synthetic polypeptide
MSFVDHPPDWLEEVGEGLREFLGLEAGPPKPKPNQQHQDQARGLVLPGYNYLGPGNGLDRGEPVNRADEVAREHDISYNEQLEAGDNPYLKYNHADAEFQEKLADDTSFGGNLGKAVFQAKKRVLEPFGLVEEGAKTAPTGKRIDDHFPKRKKARTEEDSKPSTSSDAEAGPSGSQQLQIPAQPASSLGADTMSAGGGGPLGDNNQGADGVGNASGDWHCDSTWMGDRVVTKSTRTWVLPSYNNHQYREIKSGSVDGSNANAYFGYSTPWGYFDFNRFHSHWSPRDWQRLINNYWGFRPRSLRVKIFNIQVKEVTVQDSTTTIANNLTSTVQVFTDDDYQLPYVVGNGTEGCLPAFPPQVFTLPQYGYATLNRDNTENPTERSSFFCLEYFPSKMLRTGNNFEFTYNFEEVPFHSSFAPSQNLFKLANPLVDQYLYRFVSTNNTGGVQFNKNLAGRYANTYKNWFPGPMGRTQGWNLGSGVNRASVSAFATTNRMELEGASYQVPPQPNGMTNNLQGSNTYALENTMIFNSQPANPGTTATYLEGNMLITSESETQPVNRVAYSVGGQMATNNQSSTTAPTTGTYNLQEIVPGSVWMERDVYLQGPIWAKIPETGAHFHPSPAMGGFRLKHPPPMMLIKNTPVPGNITSFSDVPVSSFITQYSTGQVTVEMEWELKKENSKRWNPEIQYTNNYNDPQFVDFAPDSTGEYRTTRPIGTRYLTRPL

SEQ ID NO: 854 - protein, 724 aa, Artificial Sequence
  Synthetic polypeptide
MSFVDHPPDWLEEVGEGLREFLGLEAGPPKPKPNQQHQDQARGLVLPGYNYLGPGNGLDRGEPVNRADEVAREHDISYNEQLEAGDNPYLKYNHADAEFQEKLADDTSFGGNLGKAVFQAKKRVLEPFGLVEEGAKTAPTGKRIDDHFPKRKKARTEEDSKPSTSSDAEAGPSGSQQLQIPAQPASSLGADTMSAGGGGPLGDNNQGADGVGNASGDWHCDSTWMGDRVVTKSTRTWVLPSYNNHQYREIKSGSVDGSNANAYFGYSTPWGYFDFNRFHSHWSPRDWQRLINNYWGFRPRSLRVKIFNIQVKEVTVQDSTTTIANNLTSTVQVFTDDDYQLPYVVGNGTEGCLPAFPPQVFTLPQYGYATLNRDNTENPTERSSFFCLEYFPSKMLRTGNNFEFTYNFEEVPFHSSFAPSQNLFKLANPLVDQYLYRFVSTNNTGGVQFNKNLAGRYANTYKNWFPGPMGRTQGWNLGSGVNRASVSAFAATNRMELEGASYQVPPQPNGMTNNLQGSNTYALENTMIFNSQPANPGTTATYLEGNMLITSESETQPVNRVAYNVGGQMATNNQSSTTAPATGTYNLQEIVPGGVWMERDVYLQGPIWAKIPETGAHFHPSPAMGGFGLKHPPPMMLIKNTPVPGNTTSFSDVPVSSFITQYSTGQVTVEMEWELKKENSKRWNPEIQYTNNYNDPQFVDFAPDSTGEYRTTRPIGTRYLTRPL

SEQ ID NO: 855 - protein, 724 aa, Artificial Sequence
  Synthetic polypeptide
MSFVDHPPDWLEEVGEGLREFLGLEAGPPKPKPNQQHQDQARGLVLPGYNYLGPGNGLDRGEPVNRADEVAREHDISYNEQLEAGDNPYLKYNHADAEFQEKLADDTSFGGNLGKVVFQAKKRVLEPFGLVEEGAKTAPTGKRIDDHFPKRKKARTEEDSKPSTSSDAEAGPSGSQQLQIPAQPASSLGADTMSAGGGGPLGGNNQGADGVGNASGDWHCDSTWMGDRVVTKSTRTWVLPSYNNHQYREIKSGSVDGSNANAYFGYSTPWGYFDFNRFHSHWGPRDWQRLINNYWGFRPRSLRVKIFNIQVKEVTVQDSTTTIANNLTSTVQVFTDDDYQLPYVVGNGTEGCLPAFPPQVFTLPQYGYATLNRDNTENPTERSSFFCLEYFPSKMLRTGNNFEFTYNFEEVPFHSSFAPSQNLFKLANPLVDQYLYRFVSTNNTGGVQFNKNLAGRYANTYKNWFPGPMGRTQGWNLGSGVNRASVSALATTNRMELEGASYQVPPQPNGMTNNLQGSNTYALENTMIFNSQPANPGTTATYLEGNMLITSESETQPVNRVAYNVGGQMATNNQSSTTAPATGTYNLQEIVPGSVWMERDVYLQGPIWAKIPETGAHFHPSPAMGGFGLKHPPPMMLIKNTPVPGNITSFSDVPVSSFITQYSTGQVTVEMEWELKKENSKRWNPEIQYTNNYNDPQFVDFAPDSTGEYRTTRPIGTRYLTRPL

SEQ ID NO: 856 - protein, 723 aa, Artificial Sequence
  Synthetic polypeptide
MSFVDHPPDWLEEVGEGLREFLGLEAGPPKPKPNQQHQDQARGLVLPGYNYLGPGNGLDRGEPVNRADEVAREHDISYNEQLEAGDNPYLKYNHADAEFQEKLADDTSFGGNLGKAVFQAKKRVLEPFGLVEEGAKTAPTGKRIDDHFPKRKKARTEEDSKPSTSSDAEAGPSGSQQLQIPAQPASSLGADTMSAGGGGPLGDNNQGADGVGNASGDWHCDSTWMGDRVVTKSTRTWVLPSYNNHQYREIKSGSVDGSNANAYFGYSTPWGYFDFNRFHSHWSPRDWQRLINNYWGFRPRSLRVKIFNIQVKEVTVQDSTTTIANNLTSTVQVFTDDDYQLPYVVGNGTEGCLPAFPPQVFTLPQYGYATLNRDNTENPTERSSFFCLEYFPSKMLRTGNNFEFTYNFEEVPFHSSFAPSQNLFKLANPLVDQYLYRFVSTNNTGGVQFNKNLAGRYANTYKNWFPGPMGRTQGWNLGSGVNRASVSAFATTNRMELEGASYQVPPQPNGMTNNLQGSNTYALENTMIFNSQPANPGTTATYLEGNMLITSESETQPVNRVAYNVGGQMATNNQSSTTAPATGTYNLQEIVPGSVWMERDVYLQGPIAKIPETGAHFHPSPAMGGFGLKHPPPMMLIKNTPVPGNITSFSDVPVSSFITQYSTGQVTVEMEWELKKENSKRWNPEIQYTNNYNDPQFVDFAPDSTGECRTTRPIGTRYLTRPL

SEQ ID NO: 857 - protein, 724 aa, Artificial Sequence
  Synthetic polypeptide
MSFVDHPPDWLEEVGEGLREFLGLEAGPPKPKPNQQHQDQARGLVLPGYNYLGPGNGLDRGEPVNRADEVAREHDISYNEQLEAGDNPYLKYNHADAEFQEKLADDTSFGGNLGKAVFQAKKRVLEPFGLVEEGAKTAPTGKRIDDHFPKRKKARTEEDSKPSTSSDAEAGPSGSQQLQIPAQPASSLGADTMSAGGGGPLGDNNQGADGVGNASGDWHCDSTWMGDRVVTKSTRTWVLPSYNNHQYREIKSGSVDGSNANAYFGYSTPWGYFDFNRFHSHWSPRDWQRLINNYWGFRPRSLRVKILNIQVKEVTVQDSTTTIANNLTSTVQVFTDDDYQLPYVVGNGTEGCLPAFPPQVFTLPQYGYATLNRDNTENPTERSSFFCLEYFPSKMLRTGNNFEFTYNFEEVPFHSSFAPSQNLFKLANPLVGQYLYRFVSTNNTGGVQFNENLAGRYANTYKNWFPGPMGRTQGWNLGSGVNRASVSAFATTNRMELEGASYQVPPQPNGMTNNLQGSNTYALENTMIFNSQPANPGTTATYLEGNMLITSESETQPVNRVAYNVGGQMATNNQSSTTAPATGTYNLQEIVPGSVWMERDVYLQGPIWAKIPETGAHFHPSPAMGGFGLKHPPPMMLIKNTPVPGNITSFSDVPVSSFITQYSTGQATVEMEWELKKENSKRWNPEIQYTNNYNDPQFVDFAPDSTGEYRTTRPIGTRYLTRPL

SEQ ID NO: 858 - protein, 724 aa, Artificial Sequence
  Synthetic polypeptide
MSFVDHPPDWLEEVGEGLREFLGLEAGPPKPKPNQQHQDQARGLVLPGYNYLGPGNGLDRGEPVNRADEVAREHDISYNEQLEAGDNPYLKYNHADAEFQEKLADDTSFGGNLGKAVFQAKKRVLEPFGLVEEGAKTAPTGKRIDDHFPKRKKARTEEDSKPSTSSDAEAGPSGSQQLQIPAQPASSLGADTMSAGGGGPLGDNNQGADGVGNASGDWHCDSTWMGDRVVTKSTRTWVLPSYNNHQYREIKSGSVDGSNANAYFGYSTPWGYFDFNRFHSHWSPRDWQRLINNYWGFRPRSLRVKIFNIQVKEVTVQDSTTIIANNLTSTVQVFTDDDYQLPYVVGNGTEGCLPAFPPQVFTLPQYGYATLNRDNTENPTERSSFFCLEYFPSKMLRTGNNFEFTYNFEEVPFHSSFAPSQNLFKLANPLVDQYLYRFVSTNNTGGVQFNKNLAGRYANTYKNWFPGPMGRTQGWNLGSGVNRASVSAFATTNRMELEGASYQVPPQPNGMTNNLQGSNTYALENTMIFNSQPANPGTTATYLEGNMLITSESETQPVNRVAYNVGGQMATNNQSSTTAPATGTYNLQEIVPGSVWMERDVYLQGPIWAKIPETGAHFHPSPAMGGFGLKHPPPMMLIKNTPVPGNITSFSDVPVSSFITQYSTGQVTVEMEWELKKENSKRWNPEIQYTNNYNDPQFVDFAPDSTGEYRTTRPIGTRYLTRPL

SEQ ID NO: 859 - protein, 724 aa, Artificial Sequence
  Synthetic polypeptide
MSFVDHPPDWLEEVGEGLREFLGLEAGPPKPKPNQQHQDQARGLVLPGYNYLGPGNGLDRGEPVNRADEVAREHDISYNEQLEAGDNPYLKYNHADAEFQEKLADDTSFGGNLGKAVFQAKKRVLEPFGLVEEGAKTAPTGKRIDDHFPKRKKARTEEDSKPSTSSDAEAGPSGSQQLQIPAQPASSLGADTMSAGGGGPLGDNNQGADGVGNASGDWHCDSTWMGDRVVTKSTRTWVLPSYNNHQYREIKSGSVDGSNANAYFGYSTPWGYFDFNRFHSHWSPRDWQRLINNYWGFRPRSLRVKIFNIQVKEVTVQDSTTTIANNLTSTVQVFTDDDYQLPYVVGNGTEGCLPAFPPQVFTLPQYGYATLNRDNTENPTERSSFFCLEYFPSKMLRTGNNFEFTYNFEEVPFHSSFAPSQNLFKLANPLVDQYLYRFVSTNNTGGVQFNKNLAGRYANTYKNWFPGPMGRTQGWNLGSGVNRASVSAFATTNRMELEGASYQVPPQPNGMTNNLQGSNTYALENTMIFNSQPANPGTTATYLEGNMLITSESETQPVNRVAYNVGGQMATNNQSSTTAPATGTYNLQEIVPGSVWMERDVYLQGPIWAKIPETGAHFHPSPAMGGFGLKHPPPMMLIKNTPVPGNITSLSDVPVSSFITQYSTGQVTVEMEWELKKENSKRWNPEIQYTNNYNDPQFVDFAPDSTGEYRTTRPIGTRYLTRPL

SEQ ID NO: 860 - protein, 724 aa, Artificial Sequence
  Synthetic polypeptide
MSFVDHPPDWLEEVGEGLREFLGLEAGPPKPKPNQQHQDQARGLVLPGYNYLGPGNGLDRGEPANRADEVAREHDISYNEQLEAGDNPYLKYNHAGAEFQEKLADDTSFGGNLGKAVFQAKKRVLEPFGLVEEGAKTAPTGKRIDDHFPKRKKARTEEDSKPSTSSDAEAGPSGSQQLQIPAQPASSLGADTMSAGGGGPLGDNNQGADGVGNASGDWHCDSTWMGDRVVTKSTRTWVLPGYNNHQYREIKSGSVDGSNANAYFGYSTPWGYFDFNRFHSHWSPRDWQRLINNYWGFRPRSLRVKIFNIQVKEVTVQDSTTTIANNLTSTVQVFTDDDYQLPYVVGNGTEGCLPAFPPQVFTLPQYGYATLNRDNTENPTERSSFFCLEYFPSKMLRTGNNFEFTYNFEEVPFHSSFAPSQNLFKLANPLVDQYLYRFVSTNNTGGVQFNKNLAGRYANTYKNWFPGPMGRTQGWNLGSGVNRASVSAFATTNRMELEGASYQVPPQPNGMTNNLQGSNTYALENTMIFNSQPANPGTTATYLEGNMLITSESETQPVNRVAYNVGGQMATNNQSSTTAPATGTYNLQEIVPGSVWMERDVYLQGPIWAKIPETGAHFHPSPAMGGFGLKHPPPMMLIKNTPVPGNITSFSDVPVSSFITQYSTGQVTVEMEWELKKENSKRWNPEIQYTNNYNDPQFVDFAPDSTGEYRTTRPIGTRYLTRPL

SEQ ID NO: 861 - protein, 724 aa, Artificial Sequence
  Synthetic polypeptide
MSFVDHPPDWLEEVGEGLREFLGLEAGPPKPKPNQQHQDQARGLVLPGYNYLGPGNGLDRGEPVNRADEVAREHDISYNEQLEAGDNPYLKYNHADAEFQEKLADDTSFGGNLGKAVFQAKKRVLEPFGLVEEGAKTAPTGKRIDDHFPKRKKARTEEDSKPPTSSDAEAGPSGSQQLQIPAQPASSLGADTMSAGGGGPLGDNNQGADGVGNASGDWHCDSTWMGDRVVTKSTRTWVLPSYNNHQYREIKSGSVDGSNANAYFGYSTPWGYFDFNRFHSHWSPRDWQRLINNYWGFRPRSLRVKIFNIQVKEVTVQDSATTIANNLTSTVQVFTDDDYQLPYVVGNGTEGCLPAFPPQVFTLPQYGYATLNRDNTENPTERSSFFCLEYFPSKMLRTGNNFEFTYNFEEVPFHSSFAPSQNLFKLANPLVDQYLYRFVSTNNTGGVQFNKNLAGRYANTYKNWFPGPMGRTQGWNLGSGVNRASVSAFATTNRMELEGASYQVPPQPNGMTNNLQGSNTYALENTMIFNSQPANPGTTATYLEGNMLITSESETQPVNRVAYNVGGQMATNNQSSTTAPATGTYNLQEIVPGSVWMERDVYLQGPIWAKIPETGAHFHPSPAMGGFGLKHPPPMMLIKNTPVPGNITSFSDVPVSSFITQYSTGQVTVEMEWELKKENSKRWNPEIQYTNNYNDPQFVDFAPDSTGEYRTTRPIGTRYLTRPL

SEQ ID NO: 862 - protein, 724 aa, Artificial Sequence
  Synthetic polypeptide
MSFVDHPPDWLEEVGEGLREFLGLEAGPPKPKPNQQHQDQARGLVLPGYNYLGPGNGLDRGEPVNRADEVAREHDISYNEQLEAGDNPYLKYNHADAEFQEKLADDTSFGGNLGKAVFQAKKRVLEPFGLVEEGAKTAPTGKRIDDHFPKRKKARTEEDSKPSTSSDAEAGPSGSQQPQIPAQPASSLGADTMSAGGGGPLGDNNQGADGVGNASGDWHCDSTWMGDRVVTKSTRTWVLPSYNNHQYREIKSGSVDGSNANAYFGYSTPWGYFDFNRFHSHWSPRDWQRLINNYWGFRPRSLRVKIFNIQVKEVTVQDSTTTIANNLTSTVQVFTDDDYQLPYVVGNGTEGCLPAFPPQVFTLPQYGYATLNRDNTENPTERSSFFCLEYFPSKMLRTGNNFEFTYNFEEVPFHSSFAPSQNLFKLANPLVDQYLYRFVSTNNTGGVQFNKNLAGRYANTYKNWFPGPMGRTQGWNLGSGVNRASVSAFATTNRMELEGASYQVPPQPNGMTNNLQGSNTYALENTMIFNSQPANPGTTATYLEGNMLITSESETQPVNRVAYNVGGQMATNNQSSTTAPATGTYNLQEIVPGSVWMERDVYLQGPIWAKIPETGAHFHPSPAMGGFGLKHPPPMMLIKNTPAPGNITSFSDVPVSSFITQYSTGQVTVEMEWELKKENSKRWNPEIQYTNNYNDPQFVDFAPDSTGEYRTTRPIGTRYLTRPL

SEQ ID NO: 863 - protein, 724 aa, Artificial Sequence
  Synthetic polypeptide
MSFVDHPPDWLEEVGEGLREFLGLEAGPPKPKPNQQHQDQARGLVLPGYNYLGPGNGLDRGEPVNRADEVAREHDISYNEQLEAGDNPYLKYNHADAEFQEKLADDTSFGGNLGKAVFQAKKRVLEPFGLVEEGAKTAPTGKRIDDHFPKRKKARTEEDSKPPTSSDAEAGPSGSQQLQIPAQPASSLGADTMSAGGGGPLGDNNQGADGVGNASGDWHCDSTWMGDRVVTKSTRTWVLPSYNNHQYREIKSGSVDGSNANAYFGYSTPWGYFDFNRFHSHWSPRDWQRLINNYWGFRPRSLRVKIFNIQVKEVTVQDSTTTIANNLTSTVQVFTDDDYQLPYVVGNGTEGCLPAFPPQVFTLPQYGYATLNRDNTENPTERSSFFCLEYFPSKMLRTGNNFEFTYNFEEVPFHSSFAPSQNLFKLANPLVDQYLYRFVSTNNTGGVQFNKNLAGRYANTYKNWFPGPMGRTQGWNLGSGVNRASVSAFATTNRMELEGASYQVPPQPNGMTNNLQGSNTYALENTMIFNSQPANPGTTATYLEGNMLITSESETQPVNRVAYNVGGQMATNNQSSTTAPATGTYNLQEIVPGSVWMERDVYLQGPIWAKIPETGAHFHPSPAMGGFGLKHPPPMMLIKNTPVPGNITSFSDVPVSSFITQYSTGQVTVEMEWELKKENSKRWNPEIQYTNNYNDPQFVDFAPDSTGEYRTTRPIGTRYLTRPL

SEQ ID NO: 864 - protein, 724 aa, Artificial Sequence
  Synthetic polypeptide
MSFVDHPPDWLEEVGEGLREFLGLEAGPPKPKPNQQHQDQARGLVLPGYNYLGPGNGLDRGEPVNRADEVAREHDISYNEQLEAGDNPYLKYNHADAEFQEKLADDTSFGGNLGKAVFQAKKRVLEPFGLVEEGAKTAPTGKRIDDHFPKRKKARTEEDSKPPTSSDAEAGPSGSQQLQIPAQPASSLGADTMSAGGGGPLGDNNQGADGVGNASGDWHCDSTWMGDRVVTKSTRTWVPPSYNNHQYREIKSGSVDGSNANAYFGYSTPWGYFDFNRFHSHWSPRDWQRLINNYWGFRPRSLRVKIFNIQVKEVTVQDSTTTIANNLTSTVQVFTDDDYQLPYVVGNGTEGCLPAFPPQVFTLPQYGYATLNRDNTENPTERSSFFCLEYFPSKMLRTGNNFEFTYNFEEVPFHSSFAPSQNLFKLANPLVDQYLYRFVSTNNTGGVQFNKNLAGRYANTYKNWFPGPMGRTQGWNLGSGVNRASVSAFATTNRMELEGASYQVPPQPNGMTNNLQGSNTYALENTMIFNSQPANPGTTATYLEGNMLITSESETQPVNRVAYNVGGQMATNNQSSTTAPATGTYNLQEIVPGSVWMERDVYLQGPIWAKIPETGAHFHPSPAMGGFGLKHPPPMMLIKNTPVPGNITSFSDVPVSSFITQYSTGQVAVEMEWELKKENSKRWNPEIQYTNNYNDPQFVDFAPDSTGEYRTTRPIGTRYLTRPL

SEQ ID NO: 865 - protein, 724 aa, Artificial Sequence
  Synthetic polypeptide
MSFVDHPPDWLEEVGEGLREFLGLEAGPPKPKPNQQHQDQARGLVLPGYNYLGPGNGLDRGEPVNRADEVAREHDISYNEQLEAGDNPYLKYNHADAEFQEKLADDTSFGGNLGKAVFQAKKRVLEPFGLVEEGAKTAPTGKRIDDHFPKRKKARTEEDSKPSTSSDAEAGPSGSQQLQIPAQPASSLGADTMSAGGGGPLGDNNQGADGVGNASGDWHCDSTWMGDRVVTKSTRTWVLPSYNNHQYREIKSGSVDGSNANAYFGYSTPWGYFDFNRFHSHWSPRDWQRLINNYWGFRPRSLRVKIFNIQVKEVTVQDSTTTIANNLTSTVQVFTDDDYQLPYVVGNGTEGCLPAFPPQVFTLPQYGYATLNRDNTENPTERSSFFCLEYFPSKMLRTGNNFEFTYNFEEVPFHSSFAPSQNLFKLANPLVDQYLYRFVSTNNTGGVQFNKNLAGRYANTYKNWFPGPMGRTQGWNLGSGVNRASVSAFATTNRMELEGASYQVPPQPNGMTNNLQGSNTYALENTMIFNSQPANPGTTATYLEGNMLITSESETQPVNRVAYNVGGQMATNNQSSTTAPATGTYNLQEIVPGSVWMERDVYLQGPIWAKIPETGAHFHPSPAMGGFGLKHPPPMMLIKNTPAPGNITSFSDVPVSSFITQYSTGQVTVEMEWELKKENSKRWNPEIQYTNNYNDPQFVDFAPDSTGEYRTTRPIGTRYLTRPL

SEQ ID NO: 866 - protein, 724 aa, Artificial Sequence
  Synthetic polypeptide
MSFVDHPPDWLEEVGEGLREFLGLEAGPPKPKPNQQHQDQARGLVLPGYNYLGPGNGLDRGEPVNRADEVAREHDISYNEQLEAGDNPYLKYNHADAEFQEKLADDTSFGGNLGKAVFQAKKRVLEPFGLAEEGAKTAPTGKRIDDHFPKRKKARTEEDSKPSTSSDAEAGPSGSQQLQIPAQPASSLGADTMSAGGGGPLGDNNQGADGVGNASGDWHCDSTWMGDRVVTKSTRTWVLPSYNNHQYREIKSGSVDGSNANAYFGYSTPWGYFDFNRFHSHWSPRDWQRLINNYWGFRPRSLRAKIFNIQVKEVTVQDSTTTIANNLTSTVQVFTDDDYQLPYVVGNGTEGCLPAFPPQVFTLPQYGYATLNRDNTENPTERSSFFCLEYFPSKMLRTGNNLEFTYNFEEVPFHSSFAPSQNLFKLANPLVDQYLYRFVSTNNTGGVQFNKNLAGRYANTYKNWFPGPMGRTQGWNLGSGVNRASVSAFATTNRMELEGASYQVPPQPNGMTNNLQGSNTYALENTMIFNSQPANPGTTATYLEGNMLITSESETQPVNRVVHNVGGQMATNNQSSTTAPATGTYNLQEIVPGSVWMERDVYLQGPIWAKIPETGAHFHPSPAMGGFGLKHPPPMMLIKNTPVPGNITSFSDVPVSSFITQYSTGQVTVEMEWELKKENSKRWNPEIQYTNNYNDPQFVDFAPDSTGEYRTTRPIGTRYLTRPL

SEQ ID NO: 867 - protein, 724 aa, Artificial Sequence
  Synthetic polypeptide
MSFVDHPPDWLEEVGEGLREFLGLEAGPPKPKPNQQHQDQARGLVLPGYNYLGPGNGLDRGEPVNRADEVAREHDISYNEQLEAGDNPYLKYNHADAEFQEKLADDTSFGGNLGKAVFQAKKRVLEPFGLVEEGAKTAPTGKRIDDHFPKRKKARTEEDSKPSTSSDAEAGPSGSQQLQIPAQPASSLGADTMSAGGGGPLGDNNQGADGVGNASGDWHCDSTWMGDRVVTKSTRTWVLPSYNNHQYREIKSGSVDGGNANAYFGYSTPWGYFDFNRFHSHWSPRDWQRLINNYWGFRPRSLRVKIFNIQVKEVTVQDSTTTIANNLTSTVQVFTDDDYQLPYVVGNGTEGCLPAFPPQVFTLPQYGYATLNRDNTENPTERSSFFCLEYFPSKMLRTGNNFEFTYNFEEVPFHSSFAPSQNLFKLANPLVDQYLYRFVSTNNTGGVQFNKNLAGRYANTYKNWFPGPMGRTQGWNLGSGVNRASVSAFATTNRMELEGASYQVPPQPNGMTNNLQGSNTYALENTMIFNSQPANPGTTATYLEGNMLITSESETQPVNRVAYNVGGQMATNNQSSTTAPATGTYNLQEIVPGSVWMERDVYLQGPIWAKIPETGAHFHPSPAMGGFGLKHPPPMMLIKNTPAPGNITSFSDVPVSSFITQYSTGQVTVEMEWELKKGNSKRWNPEIQYTNNYNDPQFVDFAPDSTGEYRTTRPIGTRYLTRPL

SEQ ID NO: 868 - protein, 724 aa, Artificial Sequence
  Synthetic polypeptide
MSFVDHPPDWLEEVGEGLREFLGLEAGPPKPKPNQQHQDQARGLVLPGYNYLGPGNGLDRGEPVNRADEVAREHDISYNEQLEAGDNPYLKYNHADAEFQEKLADDTSFGGNLGKAVFQAKKRVLEPFGLVEEGAKTAPTGKRIDDHFPKRKKARTEEDSKPSTSSDAEAGPSGSQQLQIPAQPASSLGADTMSAGGGGPLGDNNQGADGVGNASGDWHCDSTWMGDRVVTKSTRTWVLPSYNNHQYREIKSGSVDGSNANAYFGYSTPWGYFDFNRFHSHWSPRDWQRLINNYWGFRPRSLRVKIFNIQVKEVTVQDSTTTIANNLTSTVQVFTDDDYQLPYVVGNGTEGCLPAFPPQVFTLPQYGYATLNRDNTENPTERSSFFCLEYFPSKMLRTGNNFEFTYNFEEVPFHSSFAPSQNLFKLANPLVDQYLYRFVSTNNTGGVQFNKNLAGRYANTYKNWFPGPMGRTQGWNLGSGVNRASVSAFATTNRMELEGASYQVPPQPNGMTNNLQGSNTYALENTMIFNSQPANPGTTATYLEGNMLITSESETQPVNRVAYNVGGQMATNNQSSTTAPATGTYNLQEIVPGSVWMERDVYLQGPIWAKIPETGVHFHPSPAMGGFGLKHPPPMMLIKNTPVPGNITSFSDVPVSSFITQYSTGQVTVEMEWELKKENSKRWNPEIQYTNNYNDPQFVDFAPDSTGEYRTTRPIGTRYLTRPL

SEQ ID NO: 869 - protein, 724 aa, Artificial Sequence
  Synthetic polypeptide
  MOD_RES (551)..(551): Any amino acid
MSFVDHPPDWLEEVGEGLREFLGLEAGPPKPKPNQQHQDQARGLVLPGYNYLGPGNGLDRGEPVNRADEVAREHDISYNEQLEAGDNPYLKYNHADAEFQEKLADDTSFGGNLGKAVFQAKKRVLEPFGLVEEGAKTAPTGKRIDDHFPKRKKARTEEDSKPSTSSDAEAGPSGSQQLQIPAQPASSLGADTMSAGGGGPLGDNNQGADGVGNASGDWHCDSTWMGDRVVTKSTRTWVLPSYNNHQYREIKSGSVDGSNANAYFGYSTPWGYFDFNRFHSHWSPRDWQRLINNYWGFRPRSLRVKIFNIQVKEVTVQDSTTTIANNLTSTVQVFTDDDYQLPYVVGNGTEGCLPAFPPQVFTLPQYGYATLNRDNTENPTERSSFFCLEYFPSKMLRTGNNFEFTYNFEEVPFHSSFAPSQNLFKLANPLVDQYLYRFVSTNNTGGVQFNKNLAGRYANTYKNWFPGPMGRTQGWNLGSGVNRASVSAFATTNRMELEGASYQVPPQPNGMTNNLQGSNTYALENTMIFNSQPANPGTTATYLEGSMLITXESETQPVNRVAYNVGGQMATNNQSSTTAPATGTYNLQEIVPGSVWMERDVYLQGPIWAKIPETGAHFHPSPAMGGFGLKHPPPMMLIKNTPVPGNITSFSDVPVSSFITQYSTGQVTVEMEWELKKENSKRWNPEIQYTNNYNDPQFVDFAPDSTGEYRTTRPIGTRYLTRPL

SEQ ID NO: 870 - protein, 736 aa, Artificial Sequence; identical to SEQ ID NO: 44
  Synthetic polypeptide

SEQ ID NO: 871 - protein, 734 aa, Artificial Sequence; identical to SEQ ID NO: 62
  Synthetic polypeptide

SEQ ID NO: 872 - protein, 723 aa, Artificial Sequence
  Synthetic polypeptide
MSFVDHPPDWLEEVGEGLREFLGLEAGPPKPKPNQQHQDQARGLVLPGYNYLGPGNGLDRGEPVNRADEVAREHDISYNEQLEAGDNPYLKYNHADAEFQEKLADDTSFGGNLGKAVFQAKKRVLEPFGLVEEGAKTAPTGKRIDDHFPKRKKARTEEDSKPSTSSDAEAGPSGSQQLQIPAQPASSLGADTMSAGGGPLGDNNQGADGVGNASGDWHCDSTWMGDRVVTKSTRTWVLPSYNNHQYREIKSGSVDGSNANAYFGYSTPWGYFDFNRFHSHWSPRDWQRLINNYWGFRPRSLRVKIFNIQVKEVTVQDSTTTIANNLTSTVQVFTDDDYQLPYVVGNGTEGCLPAFPPQVFTLPQYGYATLNRDNTENPTERSSFFCLEYFPSKMLRTGNNFEFTYNFEEVPFHSSFAPSQNLFKLANPLVDQYLYRFVSTNNTGGVQFNKNLAGRYANTYKNWFPGPMGRTQGWNLGSGVNRASVSAFATTNRMELEGASYQVPPQPNGMTNNLQGSNTYALENTMIFNSQPANPGTTATYLEGNMLITSESETQPVNRVAYNVGGQMATNNQSSTTAPATGTYNLQEIVPGSVWMERDVYLQGPIWAKIPETGAHFHPSPAMGGFGLKHPPPMMLIKNTPVPGNITSFSDVPVSSFITQYSTGQVTVEMEWELKKENSKRWNPEIQYTNNYNDPQFVDFAPDSTGEYRTTRPIGTRYLTRPL

SEQ ID NO: 873 - protein, 743 aa, Artificial Sequence
  Synthetic polypeptide
MAADGYLPDWLEDNLSEGIREWWALKPGAPQPKANQQHQDNARGLVLPGYKYLGPGNGLDKGEPVNAADAAALEHDKAYDQQLKAGDNPYLKYNHADAEFQERLKEDTSFGGNLGRAVFQAKKRLLEPLGLVEEAAKTAPGKKRPVEQSPQEPDSSAGIGKSGAQPAKKRLNFGQTGDTESVPDPQPIGEPPAAPSGVGSLTMASGGGAPVADNNEGADGVGSSSGNWHCDSQWLGDRVITTSTRTWALPTYNNHLYKQISNSTSGGSSNDNAYFGYSTPWGYFDFNRFHCHFSPRDWQRLINNNWGFRPKRLNFKLFNIQVKEVTDNNGVKTIANNLTSTVQVFTDSDYQLPYVLGSAHEGCLPPFPADVFMIPQYGYLTLNDGSQAVGRSSFYCLEYFPSQMLRTGNNFQFSYEFENVPFHSSYAHSQSLDRLMNPLIDQYLYYLSRTINGSGQNQQTLKFSVAGPSNMAVQGRNYIPGPSYRQQRVSTTVTQNNNSEFAWPGASSWALNGRNSLMNPGPAMASHKEGEDRFFPLSGSLIFGKQGTGRDNVDADKVMITNEEEIKTTNPVATESYGQVATNHQSDGTLAVPFKAQAQTGWVQNQGILPGMVWQDRDVYLQGPIWAKIPHTDGNFHPSPLMGGFGMKHPPPQILIKNTPVPADPPTAFNKDKLNSFITQYSTGQVSVEIEWELQKENSKRWNPEIQYTSNYYKSNNVEFAVNTEGVYSEPRPIGTRYLTRNL

SEQ ID NO: 874 - protein, 743 aa, Artificial Sequence
  Synthetic polypeptide
MAADGYLPDWLEDNLSEGIREWWALKPGAPQPKANQQHQDNARGLVLPGYKYLGPGNGLDKGEPVNAADAAALEHDKAYDQQLKAGDNPYLKYNHADAEFQERLKEDTSFGGNLGRAVFQAKKRLLEPLGLVEEAAKTAPGKKRPVEQSPQEPDSSAGIGKSGAQPAKKRLNFGQTGDTESVPDPQPIGEPPAAPSGVGSLTMASGGGAPVADNNEGADGVGSSSGNWHCDSQWLGDRVITTSTRTWALPTYNNHLYKQISNSTSGGSSNDNAYFGYSTPWGYFDFNRFHCHFSPRDWQRLINNNWGFRPKRLNFKLFNIQVKEVTDNNGVKTIANNLTSTVQVFTDSDYQLPYVLGSAHEGCLPPFPADVFMIPQYGYLTLNDGSQAVGRSSFYCLEYFPSQMLRTGNNFQFSYEFENVPFHSSYAHSQSLDRLMNPLIDQYLYYLSRTINGSGQNQQTLKFSVAGPSNMAVQGRNYIPGPSYRQQRVSTTVTQNNNSEFAWPGASSWALNGRNSLMNPGPAMASHKEGEDRFFPLSGSLIFGKQGTGRDNVDADKVMITNEEEIKTTNPVATESYGQVATNHQSAQQAVRTSLAQAQTGWVQNQGILPGMVWQDRDVYLQGPIWAKIPHTDGNFHPSPLMGGFGMKHPPPQILIKNTPVPADPPTAFNKDKLNSFITQYSTGQVSVEIEWELQKENSKRWNPEIQYTSNYYKSNNVEFAVNTEGVYSEPRPIGTRYLTRNL

SEQ ID NO: 875 - protein, 736 aa, Artificial Sequence
  Synthetic polypeptide
MAADGYLPDWLEDNLSEGIREWWALKPGAPQPKANQQHQDNARGLVLPGYKYLGPGNGLDKGEPVNAADAAALEHDKAYDQQLKAGDNPYLKYNHADAEFQERLKEDTSFGGNLGRAVFQAKKRLLEPLGLVEEAAKTAPGKKRPVEQSPQEPDSSAGIGKSGAQPAKKRLNFGQTGDTESVPDPQPIGEPPAAPSGVGSLTMASGGGAPVADNNEGADGVGSSSGNWHCDSQWLGDRVITTSTRTWALPTYNNHLYKQISNSTSGGSSNDNAYFGYSTPWGYFDFNRFHCHFSPRDWQRLINNNWGFRPKRLNFKLFNIQVKEVTDNNGVKTIANNLTSTVQVFTDSDYQLPYVLGSAHEGCLPPFPADVFMIPQYGYLTLNDGSQAVGRSSFYCLEYFPSQMLRTGNNFQFSYEFENVPFHSSYAHSQSLDRLMNPLIDQYLYYLSRTINGSGQNQQTLKFSVAGPSNMAVQGRNYIPGPSYRQQRVSTTVTQNNNSEFAWPGASSWALNGRNSLMNPGPAMASHKEGEDRFFPLSGSLIFGKQGTGRDNVDADKVMITNEEEIKTTNPVATESYGQVATNHQSAQAQAQTGWVQNQGILPGMVWQDRDVYLQGPIWAKIPHTDGNFHPSPLMGGFGMKHPPPQILIKNTPVPADPPTAFNKDKLNSFITQYSTGQVSVEIEWELQKENSKRWNPEIQYTSNYYKSNNVEFAVNTEGVYSEPRPIGTRYLTRNL

SEQ ID NO: 876 - protein, 7 aa, Artificial Sequence
  Synthetic peptide
TLAVPFK

SEQ ID NO: 877 - protein, 7 aa, Artificial Sequence
  Synthetic peptide
KFPVALT

SEQ ID NO: 878 - protein, 6 aa, Artificial Sequence
  Synthetic peptide
LAVPFK

SEQ ID NO: 879 - protein, 5 aa, Artificial Sequence
  Synthetic peptide
AVPFK

SEQ ID NO: 880 - protein, 4 aa, Artificial Sequence
  Synthetic peptide
VPFK

SEQ ID NO: 881 - protein, 6 aa, Artificial Sequence
  Synthetic peptide
TLAVPF

SEQ ID NO: 882 - protein, 5 aa, Artificial Sequence
  Synthetic peptide
TLAVP

SEQ ID NO: 883 - protein, 4 aa, Artificial Sequence
  Synthetic peptide
TLAV

SEQ ID NO: 884 - protein, 7 aa, Artificial Sequence
  Synthetic peptide
SVSKPFL

SEQ ID NO: 885 - protein, 7 aa, Artificial Sequence
  Synthetic peptide
FTLTTPK

SEQ ID NO: 886 - protein, 7 aa, Artificial Sequence
  Synthetic peptide
MNATKNV

SEQ ID NO: 887 - protein, 7 aa, Artificial Sequence
  Synthetic peptide
QSSQTPR

SEQ ID NO: 888 - protein, 7 aa, Artificial Sequence
  Synthetic peptide
ILGTGTS

SEQ ID NO: 889 - protein, 7 aa, Artificial Sequence
  Synthetic peptide
TRTNPEA

SEQ ID NO: 890 - protein, 7 aa, Artificial Sequence
  Synthetic peptide
NGGTSSS

SEQ ID NO: 891 - protein, 7 aa, Artificial Sequence
  Synthetic peptide
YTLSQGW

SEQ ID NO: 892 - DNA, 21 bp, Artificial Sequence
  Synthetic oligonucleotide
aagtttcctgtggcgttgact

SEQ ID NO: 893 - DNA, 21 bp, Artificial Sequence
  Synthetic oligonucleotide
actttggcggtgccttttaag

SEQ ID NO: 894 - DNA, 21 bp, Artificial Sequence
  Synthetic oligonucleotide
agtgtgagtaagccttttttg

SEQ ID NO: 895 - DNA, 21 bp, Artificial Sequence
  Synthetic oligonucleotide
tttacgttgacgacgcctaag

SEQ ID NO: 896 - DNA, 21 bp, Artificial Sequence
  Synthetic oligonucleotide
atgaatgctacgaagaatgtg

SEQ ID NO: 897 - DNA, 21 bp, Artificial Sequence
  Synthetic oligonucleotide
cagtcgtcgcagacgcctagg

SEQ ID NO: 898 - DNA, 21 bp, Artificial Sequence
  Synthetic oligonucleotide
attctggggactggtacttcg

SEQ ID NO: 899 - DNA, 21 bp, Artificial Sequence
  Synthetic oligonucleotide
acgcggactaatcctgaggct

SEQ ID NO: 900 - DNA, 21 bp, Artificial Sequence
  Synthetic oligonucleotide
aatggggggactagtagttct

SEQ ID NO: 901 - DNA, 21 bp, Artificial Sequence
  Synthetic oligonucleotide
tatactttgtcgcagggttgg

SEQ ID NO: 902 - protein, 11 aa, Artificial Sequence
  Synthetic peptide
AQTLAVPFKAQ

SEQ ID NO: 903 - protein, 11 aa, Artificial Sequence
  Synthetic peptide
AQSVSKPFLAQ

SEQ ID NO: 904 - protein, 11 aa, Artificial Sequence
  Synthetic peptide
AQFTLTTPKAQ

SEQ ID NO: 905 - protein, 11 aa, Artificial Sequence
  Synthetic peptide
DGTLAVPFKAQ

SEQ ID NO: 906 - protein, 11 aa, Artificial Sequence
  Synthetic peptide
ESTLAVPFKAQ

SEQ ID NO: 907 - protein, 11 aa, Artificial Sequence
  Synthetic peptide
GGTLAVPFKAQ

SEQ ID NO: 908 - protein, 11 aa, Artificial Sequence
  Synthetic peptide
AQTLATPFKAQ

SEQ ID NO: 909 - protein, 11 aa, Artificial Sequence
  Synthetic peptide
ATTLATPFKAQ

SEQ ID NO: 910 - protein, 11 aa, Artificial Sequence
  Synthetic peptide
DGTLATPFKAQ

SEQ ID NO: 911 - protein, 11 aa, Artificial Sequence
  Synthetic peptide
GGTLATPFKAQ

SEQ ID NO: 912 - protein, 11 aa, Artificial Sequence
  Synthetic peptide
SGSLAVPFKAQ

SEQ ID NO: 913 - protein, 11 aa, Artificial Sequence
  Synthetic peptide
AQTLAQPFKAQ

SEQ ID NO: 914 - protein, 11 aa, Artificial Sequence
  Synthetic peptide
AQTLQQPFKAQ

SEQ ID NO: 915 - protein, 11 aa, Artificial Sequence
  Synthetic peptide
AQTLSNPFKAQ

SEQ ID NO: 916 - protein, 11 aa, Artificial Sequence
  Synthetic peptide
AQTLAVPFSNP

SEQ ID NO: 917 - protein, 11 aa, Artificial Sequence
  Synthetic peptide
QGTLAVPFKAQ

SEQ ID NO: 918 - protein, 11 aa, Artificial Sequence
  Synthetic peptide
NQTLAVPFKAQ

SEQ ID NO: 919 - protein, 11 aa, Artificial Sequence
  Synthetic peptide
EGSLAVPFKAQ

SEQ ID NO: 920 - protein, 11 aa, Artificial Sequence
  Synthetic peptide
SGNLAVPFKAQ

SEQ ID NO: 921 - protein, 11 aa, Artificial Sequence
  Synthetic peptide
EGTLAVPFKAQ

SEQ ID NO: 922 - protein, 11 aa, Artificial Sequence
  Synthetic peptide
DSTLAVPFKAQ

SEQ ID NO: 923 - protein, 11 aa, Artificial Sequence
  Synthetic peptide
AVTLAVPFKAQ

SEQ ID NO: 924 - protein, 11 aa, Artificial Sequence
  Synthetic peptide
AQTLSTPFKAQ

SEQ ID NO: 925 - protein, 11 aa, Artificial Sequence
  Synthetic peptide
AQTLPQPFKAQ

SEQ ID NO: 926 - protein, 11 aa, Artificial Sequence
  Synthetic peptide
AQTLSQPFKAQ

SEQ ID NO: 927 - protein, 11 aa, Artificial Sequence
  Synthetic peptide
AQTLQLPFKAQ

SEQ ID NO: 928 - protein, 11 aa, Artificial Sequence
  Synthetic peptide
AQTLTMPFKAQ

SEQ ID NO: 929 - protein, 11 aa, Artificial Sequence
  Synthetic peptide
AQTLTTPFKAQ

SEQ ID NO: 930 - protein, 11 aa, Artificial Sequence
  Synthetic peptide
AQYTLSQGWAQ

SEQ ID NO: 931 - protein, 11 aa, Artificial Sequence
  Synthetic peptide
AQMNATKNVAQ

SEQ ID NO: 932 - protein, 11 aa, Artificial Sequence
  Synthetic peptide
AQVSGGHHSAQ

SEQ ID NO: 933 - protein, 11 aa, Artificial Sequence
  Synthetic peptide
AQTLTAPFKAQ

SEQ ID NO: 934 - protein, 11 aa, Artificial Sequence
  Synthetic peptide
AQTLSKPFKAQ

SEQ ID NO: 935 - protein, 7 aa, Artificial Sequence
  Synthetic peptide
QAVRTSL

SEQ ID NO: 936 - protein, 7 aa, Artificial Sequence
  Synthetic peptide
LAKERLS

SEQ ID NO: 937 - protein, 7 aa, Artificial Sequence
  Synthetic peptide
MNSTKNV

SEQ ID NO: 938 - protein, 7 aa, Artificial Sequence
  Synthetic peptide
VSGGHHS

SEQ ID NO: 939 - protein, 14 aa, Artificial Sequence
  Synthetic peptide
SAQTLAVPFKAQAQ

SEQ ID NO: 940 - protein, 14 aa, Artificial Sequence
  Synthetic peptide
  MOD_RES (2)..(4): Any amino acid
SXXXLAVPFKAQAQ

SEQ ID NO: 941 - protein, 14 aa, Artificial Sequence
  Synthetic peptide
  MOD_RES (4)..(6): Any amino acid
SAQXXXVPFKAQAQ

SEQ ID NO: 942 - protein, 14 aa, Artificial Sequence
  Synthetic peptide
  MOD_RES (6)..(8): Any amino acid
SAQTLXXXFKAQAQ

SEQ ID NO: 943 - protein, 14 aa, Artificial Sequence
  Synthetic peptide
  MOD_RES (8)..(10): Any amino acid
SAQTLAVXXXAQAQ

SEQ ID NO: 944 - protein, 14 aa, Artificial Sequence
  Synthetic peptide
  MOD_RES (10)..(12): Any amino acid
SAQTLAVPFXXXAQ

SEQ ID NO: 945 - protein, 7 aa, Artificial Sequence
  Synthetic peptide
TNHQSAQ

SEQ ID NO: 946 - protein, 7 aa, Artificial Sequence
  Synthetic peptide
AQAQTGW

SEQ ID NO: 947 - protein, 9 aa, Artificial Sequence
  Synthetic peptide
DGTLATPFK

SEQ ID NO: 948 - protein, 11 aa, Artificial Sequence
  Synthetic peptide
  MOD_RES (10)..(11): Any amino acid
DGTLATPFKXX

SEQ ID NO: 949 - protein, 8 aa, Artificial Sequence
  Synthetic peptide
LAVPFKAQ

SEQ ID NO: 950 - protein, 6 aa, Artificial Sequence
  Synthetic peptide
VPFKAQ

SEQ ID NO: 951 - protein, 4 aa, Artificial Sequence
  Synthetic peptide
FKAQ

SEQ ID NO: 952 - protein, 6 aa, Artificial Sequence
  Synthetic peptide
AQTLAV

SEQ ID NO: 953 - protein, 8 aa, Artificial Sequence
  Synthetic peptide
AQTLAVPF

SEQ ID NO: 954 - protein, 4 aa, Artificial Sequence
  Synthetic peptide
QAVR

SEQ ID NO: 955 - protein, 4 aa, Artificial Sequence
  Synthetic peptide
AVRT

SEQ ID NO: 956 - protein, 4 aa, Artificial Sequence
  Synthetic peptide
VRTS

SEQ ID NO: 957 - protein, 4 aa, Artificial Sequence
  Synthetic peptide
RTSL

SEQ ID NO: 958 - protein, 5 aa, Artificial Sequence
  Synthetic peptide
QAVRT

SEQ ID NO: 959 - protein, 5 aa, Artificial Sequence
  Synthetic peptide
AVRTS

SEQ ID NO: 960 - protein, 5 aa, Artificial Sequence
  Synthetic peptide
VRTSL

SEQ ID NO: 961 - protein, 6 aa, Artificial Sequence
  Synthetic peptide
QAVRTS

SEQ ID NO: 962 - protein, 6 aa, Artificial Sequence
  Synthetic peptide
AVRTSL

SEQ ID NO: 963 - DNA, 33 bp, Artificial Sequence
  Synthetic oligonucleotide
gatgggactttggcggtgccttttaaggcacag

SEQ ID NO: 964 - DNA, 33 bp, Artificial Sequence
  Synthetic oligonucleotide
gatgggacgttggcggtgccttttaaggcacag

SEQ ID NO: 965 - DNA, 21 bp, Artificial Sequence
  Synthetic oligonucleotide
caggcggttaggacgtctttg

SEQ ID NO: 966 - DNA, 27 bp, Artificial Sequence
  Synthetic oligonucleotide
caggtcttcacggactcagactatcag

SEQ ID NO: 967 - DNA, 32 bp, Artificial Sequence
  Synthetic oligonucleotide
caagtaaaacctctacaaatgtggtaaaatcg

SEQ ID NO: 968 - DNA, 36 bp, Artificial Sequence
  Synthetic oligonucleotide
actcatcgaccaatacttgtactatctctctagaac

SEQ ID NO: 969 - DNA, 26 bp, Artificial Sequence
  Synthetic oligonucleotide
ggaagtattccttggttttgaaccca

SEQ ID NO: 970 - DNA, 23 bp, Artificial Sequence
  Synthetic oligonucleotide
ggtcgcggttcttgtttgtggat

SEQ ID NO: 971 - DNA, 24 bp, Artificial Sequence
  Synthetic oligonucleotide
cgaccttgaagcgcatgaactcct

SEQ ID NO: 972 - DNA, 83 bp, Artificial Sequence
  Synthetic oligonucleotide
  modified_base (42)..(43): a, c, t, or g
  misc_feature (42)..(43): n is a, c, g, or t
  modified_base (45)..(46): a, c, t, or g
  misc_feature (45)..(46): n is a, c, g, or t
  modified_base (48)..(49): a, c, t, or g
  misc_feature (48)..(49): n is a, c, g, or t
  modified_base (51)..(52): a, c, t, or g
  misc_feature (51)..(52): n is a, c, g, or t
  modified_base (54)..(55): a, c, t, or g
  misc_feature (54)..(55): n is a, c, g, or t
  modified_base (57)..(58): a, c, t, or g
  misc_feature (57)..(58): n is a, c, g, or t
  modified_base (60)..(61): a, c, t, or g
  misc_feature (60)..(61): n is a, c, g, or t
gtattccttggttttgaacccaaccggtctgcgcctgtgcmnnmnnmnnmnnmnnmnnmnnttgggcactctggtggtttgtc

SEQ ID NO: 973 - DNA, 64 bp, Artificial Sequence
  Synthetic oligonucleotide
  modified_base (36)..(37): a, c, t, or g
  misc_feature (36)..(37): n is a, c, g, or t
  modified_base (39)..(40): a, c, t, or g
  misc_feature (39)..(40): n is a, c, g, or t
  modified_base (42)..(43): a, c, t, or g
  misc_feature (42)..(43): n is a, c, g, or t
gtattccttggttttgaacccaaccggtctgcgcmnnmnnmnnaaaaggcaccgccaaagtttg

SEQ ID NO: 974 - DNA, 70 bp, Artificial Sequence
  Synthetic oligonucleotide
  modified_base (42)..(43): a, c, t, or g
  misc_feature (42)..(43): n is a, c, g, or t
  modified_base (45)..(46): a, c, t, or g
  misc_feature (45)..(46): n is a, c, g, or t
  modified_base (48)..(49): a, c, t, or g
  misc_feature (48)..(49): n is a, c, g, or t
gtattccttggttttgaacccaaccggtctgcgcctgtgcmnnmnnmnncaccgccaaagtttgggcact

SEQ ID NO: 975 - DNA, 77 bp, Artificial Sequence
  Synthetic oligonucleotide
  modified_base (48)..(49): a, c, t, or g
  misc_feature (48)..(49): n is a, c, g, or t
  modified_base (51)..(52): a, c, t, or g
  misc_feature (51)..(52): n is a, c, g, or t
  modified_base (54)..(55): a, c, t, or g
  misc_feature (54)..(55): n is a, c, g, or t
gtattccttggttttgaacccaaccggtctgcgcctgtgccttaaamnnmnnmnncaaagtttgggcactctggtgg

SEQ ID NO: 976 - DNA, 83 bp, Artificial Sequence
  Synthetic oligonucleotide
  modified_base (54)..(55): a, c, t, or g
  misc_feature (54)..(55): n is a, c, g, or t
  modified_base (57)..(58): a, c, t, or g
  misc_feature (57)..(58): n is a, c, g, or t
  modified_base (60)..(61): a, c, t, or g
  misc_feature (60)..(61): n is a, c, g, or t
gtattccttggttttgaacccaaccggtctgcgcctgtgccttaaaaggcacmnnmnnmnnttgggcactctggtggtttgtg

SEQ ID NO: 977 - DNA, 21 bp, Artificial Sequence
  Synthetic oligonucleotide
cttgcgaaggagcggctttcg

SEQ ID NO: 978 - protein, 480 aa, Homo sapiens
MNASEFRRRGKEMVDYVANYMEGIEGRQVYPDVEPGYLRPLIPAAAPQEPDTFEDIINDVEKIIMPGVTHWHSPYFFAYFPTASSYPAMLADMLCGAIGCIGFSWAASPACTELETVMMDWLGKMLELPKAFLNEKAGEGGGVIQGSASEATLVALLAARTKVIHRLQAASPELTQAAIMEKLVAYSSDQAHSSVERAGLIGGVKLKAIPSDGNFAMRASALQEALERDKAAGLIPFFMVATLGTTTCCSFDNLLEVGPICNKEDIWLHVDAAYAGSAFICPEFRHLLNGVEFADSFNFNPHKWLLVNFDCSAMWVKKRTDLTGAFRLDPTYLKHSHQDSGLITDYRHWQIPLGRRFRSLKMWFVFRMYGVKGLQAYIRKHVQLSHEFESLVRQDPRFEICVEVILGLVCFRLKGSNKVNEALLQRINSAKKIHLVPCHLRDKFVLRFAICSRTVESAHVQRAWEHIKELAADVLRAERE

SEQ ID NO: 979 - DNA, 3526 bp, Artificial Sequence
  Synthetic polynucleotide
cctgcaggcagctgcgcgctcgctcgctcactgaggccgcccgggcaaagcccgggcgtcgggcgacctttggtcgcccggcctcagtgagcgagcgagcgcgcagagagggagtggccaactccatcactaggggttccttgtagttaatgattaacccgccatgctacttatctacgtagccatgcgtcgacataacgcgtatatctagacgttacataacttacggtaaatggcccgcctggctgaccgcccaacgacccccgcccattgacgtcaataatgacgtatgttcccatagtaacgccaatagggactttccattgacgtcaatgggtggagtatttacggtaaactgcccacttggcagtacatcaagtgtatcatatgccaagtacgccccctattgacgtcaatgacggtaaatggcccgcctggcattatgcccagtacatgaccttatgggactttcctacttggcagtacatctagtattagtcatcgctattaccatggtgatgcggttttggcagtacatcaatgggcgtggatagcggtttgactcacggggatttccaagtctccaccccattgacgtcaatgggagtttgttttggcaccaaaatcaacgggactttccaaaatgtcgtaacaactccgccccattgacgcaaatgggcggtaggcgtgtacggtgggaggtctatataagcagagctcgtttagtgaaccgtcagatcgcctggagacgccatccacgctgttttgacctccatagaagacaccgggaccgatccagcctccgcggattcgaatcccggccgggaacggtgcattggaacgcggattccccgtgccaagagtgacgtaagtaccgcctatagagtctataggcccacaaaaaatgctttcttcttttaatatacttttttgtttatcttatttctaatactttccctaatctctttctttcagggcaataatgatacaatgtatcatgcctctttgcaccattctaaagaataacagtgataatttctgggttaaggcaatagcaatatttctgcatataaatatttctgcatataaattgtaactgatgtaagaggtttcatattgctaatagcagctacaatccagctaccattctgcttttattttatggttgggataaggctggattattctgagtccaagctaggcccttttgctaatcatgttcatacctcttatcttcctcccacagctcctgggcaacgtgctggtctgtgtgctggcccatcactttggcaaagaattgggattcgaacatcgattgaattccccggggatccaccatgaacgcaagtgaattccgaaggagagggaaggagatggtggattacgtggccaactacatggaaggcattgagggacgccaggtctaccctgacgtggagcccgggtacctgcggccgctgatccctgccgctgcccctcaggagccagacacgtttgaggacatcatcaacgacgttgagaagataatcatgcctggggtgacgcactggcacagcccctacttcttcgcctacttccccactgccagctcgtacccggccatgcttgcggacatgctgtgcggggccattggctgcatcggcttctcctgggcggcaagcccagcatgcacagagctggagactgtgatgatggactggctcgggaagatgctggaactaccaaaggcatttttgaatgagaaagctggagaagggggaggagtgatccagggaagtgccagtgaagccaccctggtggccctgctggccgctcggaccaaagtgatccatcggctgcaggcagcgtccccagagctcacacaggccgctatcatggagaagctggtggcttactcatccgatcaggcacactcctcagtggaaagagctgggttaattggtggagtgaaattaaaagccatcccctcagatggcaacttcgccatgcgtgcgtctgccctgcaggaagccctggagagagacaaagcggctggcctgattcctttctttatggttgccaccctggggaccacaacatgctgctcctttgacaatctcttagaagtcggtcctatctgcaacaaggaagacatatggctgcacgttgatgcagcctacgcaggcagtgcattcatctgccctgagttccggcaccttctgaatggagtggagtttgcagattcattcaactttaatccccacaaatggctattggtgaattttgactgttctgccatgtgggtgaaaaagagaacagacttaacgggagcctttagactggaccccacttacctgaagcacagccatcaggattcagggcttatcactgactaccggcattggcagataccactgggcagaagatttcgctctttgaaaatgtggtttgtatttaggatgtatggagtcaaaggactgcaggcttatatccgcaagcatgtccagctgtcccatgagtttgagtcactggtgcgccaggatccccgctttgaaatctgtgtggaagtcattctggggcttgtctgctttcggctaaagggttccaacaaagtgaatgaagctcttctgcaaagaataaacagtgccaaaaaaatccacttggttccatgtcacctcagggacaagtttgtcctgcgctttgccatctgttctcgcacggtggaatctgcccatgtgcagcgggcctgggaacacatcaaagagctggcggccgacgtgctgcgagcagagagggagtaggagtgaagccaggacctgcagaagcttgcctcgagcagcgctgctcgagagatctacgggtggcatccctgtgacccctccccagtgcctctcctggccctggaagttgccactccagtgcccaccagccttgtcctaataaaattaagttgcatcattttgtctgactaggtgtccttctataatattatggggtggaggggggtggtatggagcaaggggcaagttgggaagacaacctgtagggcctgcggggtctattgggaaccaagctggagtgcagtggcacaatcttggctcactgcaatctccgcctcctgggttcaagcgattctcctgcctcagcctcccgagttgttgggattccaggcatgcatgaccaggctcagctaatttttgtttttttggtagagacggggtttcaccatattggccaggctggtctccaactcctaatctcaggtgatctacccaccttggcctcccaaattgctgggattacaggcgtgaaccactgctcccttccctgtccttactagatttaaatatgtcgtgcatcgatgctacgtagataagtagcatggcgggttaatcattaactacagaggaacccctagtgatggagttggccactccctctctgcgcgctcgctcgctcactgaggccgggcgaccaaaggtcgcccgacgcccgggctttgcccgggcggcctcagtgagcgagcgagcgcgcagctgcctgcagg

SEQ ID NO: 980 - DNA, 141 bp, Artificial Sequence
  Synthetic polynucleotide
cctgcaggcagctgcgcgctcgctcgctcactgaggccgcccgggcaaagcccgggcgtcgggcgacctttggtcgcccggcctcagtgagcgagcgagcgcgcagagagggagtggccaactccatcactaggggttcct

SEQ ID NO: 981 - DNA, 18 bp, Artificial Sequence
  Synthetic oligonucleotide
gtcgacataacgcgtata

SEQ ID NO: 982 - DNA, 303 bp, Artificial Sequence
  Synthetic polynucleotide
cgttacataacttacggtaaatggcccgcctggctgaccgcccaacgacccccgcccattgacgtcaataatgacgtatgttcccatagtaacgccaatagggactttccattgacgtcaatgggtggagtatttacggtaaactgcccacttggcagtacatcaagtgtatcatatgccaagtacgccccctattgacgtcaatgacggtaaatggcccgcctggcattatgcccagtacatgaccttatgggactttcctacttggcagtacatctagtattagtcatcgctattaccatg

SEQ ID NO: 983 - DNA, 204 bp, Artificial Sequence
  Synthetic polynucleotide
gtgatgcggttttggcagtacatcaatgggcgtggatagcggtttgactcacggggatttccaagtctccaccccattgacgtcaatgggagtttgttttggcaccaaaatcaacgggactttccaaaatgtcgtaacaactccgccccattgacgcaaatgggcggtaggcgtgtacggtgggaggtctatataagcagagct

SEQ ID NO: 984 - DNA, 134 bp, Artificial Sequence
  Synthetic polynucleotide
tcagatcgcctggagacgccatccacgctgttttgacctccatagaagacaccgggaccgatccagcctccgcggattcgaatcccggccgggaacggtgcattggaacgcggattccccgtgccaagagtgac

SEQ ID NO: 985 - DNA, 32 bp, Artificial Sequence
  Synthetic oligonucleotide
gtaagtaccgcctatagagtctataggcccac

SEQ ID NO: 986 - DNA, 347 bp, Artificial Sequence
  Synthetic polynucleotide
aaaaaatgctttcttcttttaatatacttttttgtttatcttatttctaatactttccctaatctctttctttcagggcaataatgatacaatgtatcatgcctctttgcaccattctaaagaataacagtgataatttctgggttaaggcaatagcaatatttctgcatataaatatttctgcatataaattgtaactgatgtaagaggtttcatattgctaatagcagctacaatccagctaccattctgcttttattttatggttgggataaggctggattattctgagtccaagctaggcccttttgctaatcatgttcatacctcttatcttcctcccacag

SEQ ID NO: 987 - DNA, 53 bp, Artificial Sequence
  Synthetic oligonucleotide
ctcctgggcaacgtgctggtctgtgtgctggcccatcactttggcaaagaatt

SEQ ID NO: 988 - DNA, 1440 bp, Artificial Sequence
  Synthetic polynucleotide
atgaacgcaagtgaattccgaaggagagggaaggagatggtggattacgtggccaactacatggaaggcattgagggacgccaggtctaccctgacgtggagcccgggtacctgcggccgctgatccctgccgctgcccctcaggagccagacacgtttgaggacatcatcaacgacgttgagaagataatcatgcctggggtgacgcactggcacagcccctacttcttcgcctacttccccactgccagctcgtacccggccatgcttgcggacatgctgtgcggggccattggctgcatcggcttctcctgggcggcaagcccagcatgcacagagctggagactgtgatgatggactggctcgggaagatgctggaactaccaaaggcatttttgaatgagaaagctggagaagggggaggagtgatccagggaagtgccagtgaagccaccctggtggccctgctggccgctcggaccaaagtgatccatcggctgcaggcagcgtccccagagctcacacaggccgctatcatggagaagctggtggcttactcatccgatcaggcacactcctcagtggaaagagctgggttaattggtggagtgaaattaaaagccatcccctcagatggcaacttcgccatgcgtgcgtctgccctgcaggaagccctggagagagacaaagcggctggcctgattcctttctttatggttgccaccctggggaccacaacatgctgctcctttgacaatctcttagaagtcggtcctatctgcaacaaggaagacatatggctgcacgttgatgcagcctacgcaggcagtgcattcatctgccctgagttccggcaccttctgaatggagtggagtttgcagattcattcaactttaatccccacaaatggctattggtgaattttgactgttctgccatgtgggtgaaaaagagaacagacttaacgggagcctttagactggaccccacttacctgaagcacagccatcaggattcagggcttatcactgactaccggcattggcagataccactgggcagaagatttcgctctttgaaaatgtggtttgtatttaggatgtatggagtcaaaggactgcaggcttatatccgcaagcatgtccagctgtcccatgagtttgagtcactggtgcgccaggatccccgctttgaaatctgtgtggaagtcattctggggcttgtctgctttcggctaaagggttccaacaaagtgaatgaagctcttctgcaaagaataaacagtgccaaaaaaatccacttggttccatgtcacctcagggacaagtttgtcctgcgctttgccatctgttctcgcacggtggaatctgcccatgtgcagcgggcctgggaacacatcaaagagctggcggccgacgtgctgcgagcagagagggag

SEQ ID NO: 989 - DNA, 18 bp, Artificial Sequence
  Synthetic oligonucleotide
gctgctcgagagatctac

SEQ ID NO: 990 - DNA, 477 bp, Artificial Sequence
  Synthetic polynucleotide
gggtggcatccctgtgacccctccccagtgcctctcctggccctggaagttgccactccagtgcccaccagccttgtcctaataaaattaagttgcatcattttgtctgactaggtgtccttctataatattatggggtggaggggggtggtatggagcaaggggcaagttgggaagacaacctgtagggcctgcggggtctattgggaaccaagctggagtgcagtggcacaatcttggctcactgcaatctccgcctcctgggttcaagcgattctcctgcctcagcctcccgagttgttgggattccaggcatgcatgaccaggctcagctaatttttgtttttttggtagagacggggtttcaccatattggccaggctggtctccaactcctaatctcaggtgatctacccaccttggcctcccaaattgctgggattacaggcgtgaaccactgctcccttccctgtcctt

SEQ ID NO: 991 - DNA, 141 bp, Artificial Sequence
  Synthetic polynucleotide
aggaacccctagtgatggagttggccactccctctctgcgcgctcgctcgctcactgaggccgggcgaccaaaggtcgcccgacgcccgggctttgcccgggcggcctcagtgagcgagcgagcgcgcagctgcctgcagg

SEQ ID NO: 992 - protein, 534 aa, Artificial Sequence
  Synthetic polypeptide
MAEGGGGAMGDSSGGADGVGNASGNWHCDSQWMGNTVITKTTRTWVLPSYNNHIYKAITSGTSQDANVQYAGYSTPWGYFDFNRFHCHFSPRDWQRLINNHWGIRPKSLKFKIFNVQVKEVTTQDQTKTIANNLTSTIQVFTDDEHQLPYVLGSATEGTMPPFPSDVYALPQYGYCTMHTNQNGARFNDRSAFYCLEYFPSQMLRTGNNFEFTFDFEEVPFHSMFAHSQDLDRLMNPLVDQYLWNFNEVDSSRNAQFKKAVKGAYGTMGRNWLPGPKFLDQRVRAYTGGTDNYANWNIWSNGNKVNLKDRQYLLQPGPVSATYTEGEASSLPAQNILGIAKDPYRSGSTTAGISDIMVTEEQEVAPTNGVGWKPYGRTVTNEQNTTTAPTSSDLDVLGALPGMVWQNRDIYLQGPIGAKIPKTDGKFHPSPNLGGFGLHNPPPQVFIKNTPVPADPPVEYVHQKWNSYITQYSTGQCTVEMVWELRKENSKRWNPEIQFTSNFSNRTSIMFAPNETGGYVEDRLIGTRYLTQNL

SEQ ID NO: 993 - protein, 554 aa, Artificial Sequence
  Synthetic polypeptide
MTSVNSAEASTGAGGGGSNPVKSMWSEGATFSANSVTCTFSRQFLIPYDPEHHYKVFSPAASSCHNASGKEAKVCTISPIMGYSTPWRYLDFNALNLFFSPLEFQHLIENYGSIAPDALTVTISEIAVKDVTDKTGGGVQVTDSTTGRLCMLVDHEYKYPYVLGQGQDTLAPELPIWVYFPPQYAYLTVGDVNTQGISGDSKKLASEESAFYVLEHSSFQLLGTGGTATMSYKFPPVPPENLEGCSQHFYEMYNPLYGSRLGVPDTLGGDPKFRSLTHEDHAIQPQNFMPGPLVNSVSTKEGDSFNTGAGKALTGLSTGTSQNTRISLRPGPVSQPYHHWDTDKYVTGINAISHGQTTYGNAEDKEYQQGVGRFPNEKEQLKQLQGLNMHTYFPNKGTQQYTDQIERPLMVGSVWNRRALHYESQLWSKIPNLDDSFKTQFAALGGWGLHQPPPQIFLKILPQSGPIGGIKSMGITTLVQYAVGIMTVTMTFKLGPRKATGRWNPQPGVYPPHAAGHLPYVLYDPTATDAKQHHRHGYEKPEELWTAKSRVHPL

SEQ ID NO: 994 - protein, 587 aa, Artificial Sequence
  Synthetic polypeptide
MSDGTSQPDGGNAVHSAARVERAADGPGGSGGGGSGGGGVGVSTGSYDNQTHYRFLGDGWVEITALATRLVHLNMPKSENYCRIRVHNTTDTSVKGNMAKDDAHEQIWTPWSLVDANAWGVWLQPSDWQYICNTMSQLNLVSLDQEIFNVVLKTVTEQDSGGQAIKIYNNDLTACMMVAVDSNNILPYTPAANSMETLGFYPWKPTIASPYRYYFCVDRDLSVTYENQEGTIEHNVMGTPKGMNSQFFTIENTQQITLLRTGDEFATGTYYFDTNPVKLTHTWQTNRQLGQPPLLSTFPEADTDAGTLTAQGSRHGATQMEVNWVSEAIRTRPAQVGFCQPHNDFEASRAGPFAAPKVPADVTQGMDREANGSVRYSYGKQHGENWAAHGPAPERYTWDETNFGSGRDTRDGFIQSAPLVVPPPLNGILTNANPIGTKNDIHFSNVFNSYGPLTTFSHPSPVYPQGQIWDKELDLEHKPRLHITAPFVCKNNAPGQMLVRLGPNLTDQYDPNGATLSRIVTYGTFFWKGKLTMRAKLRANTTWNPVYQVSVEDNGNSYMSVTKWLPTATGNMQSVPLITRPVARNTY

SEQ ID NO: 995 - protein, 584 aa, Artificial Sequence
  Synthetic polypeptide
MSDGAVQPDGGQPAVRNERATGSGNGSGGGGGGGSGGVGISTGTFNNQTEFKFLENGWVEITANSSRLVHLNMPESENYKRVVVNNMDKTAVKGNMALDDIHVEIVTPWSLVDANAWGVWFNPGDWQLIVNTMSELHLVSFEQEIFNVVLKTVSESATQPPTKVYNNDLTASLMVALDSNNTMPFTPAAMRSETLGFYPWKPTIPTPWRYYFQWDRTLIPSHTGTSGTPTNVYHGTDPDDVQFYTIENSVPVHLLRTGDEFATGTFFFDCKPCRLTHTWQTNRALGLPPFLNSLPQSEGATNFGDIGVQQDKRRGVTQMGNTDYITEATIMRPAEVGYSAPYYSFEASTQGPFKTPIAAGRGGAQTDENQAADGDPRYAFGRQHGQKTTTTGETPERFTYIAHQDTGRYPEGDWIQNINFNLPVTNDNVLLPTDPIGGKTGINYTNIFNTYGPLTALNNVPPVYPNGQIWDKEFDTDLKPRLHINAPFVCQNNCPGQLFVKVAPNLTNQYDPDASANMSRIVTYSDFWWKGKLVFKAKLRASHTWNPIQQMSINVDNQFNYVPNNIGAMKIVYEKSQLAPRKLY

SEQ ID NO: 996 - protein, 548 aa, Artificial Sequence
  Synthetic polypeptide
GVGISTGTFNNQTEFKFLENGWVEITANSSRLVHLNMPESENYRRVVVNNMDKTAVNGNMALDDIHAQIVTPWSLVDANAWGVWFNPGDWQLIVNTMSELHLVSFEQEIFNVVLKTVSESATQPPTKVYNNDLTASLMVALDSNNTMPFTPAAMRSETLGFYPWKPTIPTPWRYYFQWDRTLIPSHTGTSGTPTNIYHGTDPDDVQFYTIENSVPVHLLRTGDEFATGTFFFDCKPCRLTHTWQTNRALGLPPFLNSLPQSEGATNFGDIGVQQDKRRGVTQMGNTNYITEATIMRPAEVGYSAPYYSFEASTQGPFKTPIAAGRGGAQTDENQAADGNPRYAFGRQHGQKTTTTGETPERFTYIAHQDTGRYPEGDWIQNINFNLPVTNDNVLLPTDPIGGKTGINYTNIFNTYGPLTALNNVPPVYPNGQIWDKEFDTDLKPRLHVNAPFVCQNNCPGQLFVKVAPNLTNEYDPDASANMSRIVTYSDFWWKGKLVFKAKLRASHTWNPIQQMSINVDNQFNYVPSNIGGMKIVYEKSQLAPRKLY

SEQ ID NO: 997 - protein, 736 aa, Artificial Sequence; identical to SEQ ID NO: 106
  Synthetic polypeptide

SEQ ID NO: 998 - protein, 736 aa, Artificial Sequence; identical to SEQ ID NO: 101
  Synthetic polypeptide

SEQ ID NO: 999 - protein, 736 aa, Artificial Sequence
  Synthetic polypeptide
MAADGYLPDWLEDTLSEGIRQWWKLKPGPPPPKPAERHKDDSRGLVLPGYKYLGPFNGLDKGEPVNEADAAALEHDKAYDRQLDSGDNPYLKYNHADAEFQERLKEDTSFGGNLGRAVFQAKKRVLEPLGLVEEPVKTAPGKKRPVEHSPVEEPDSSSGTGKAGQQPARKRLNFGQTGDADSVPDPQPLGQPPAAPSGLGTNTMATGSGAPMADNNEGADGVGNSSGNWHCDSTWMGDRVITTSTRTWALPTYNNHLYKQISSQSGASNDNHYFGYSTPWGYFDFNRFHCHFSPRDWQRLINNNWGFRPKRLNFKLFNIQVKEVTQNDGTTTIANNLTSTVQVFTDSEYQLPYVLGSAHQGCLPPFPADVFMVPQYGYLTLNNGSQAVGRSSFYCLEYFPSQMLRTGNNFTFSYTFEDVPFHSSYAHSQSLDRLMNPLIDQYLYYLSRTNTPSGTTTQSRLQFSQAGASDIRDQSRNWLPGPCYRQQRVSKTSADNNNSEYSWTGATKYHLNGRDSLVNPGPAMASHKDDEEKFFPQSGVLIFGKQGSEKTNVDIEKVMITDEEEIRTTNPVATEQYGSVSTNLQRGNRQAATADVNTQGVLPGMVWQDRDVYLQGPIWAKIPHTDGHFHPSPLMGGFGLKHPPPQILIKNTPVPANPSTTFSAAKFASFITQYSTGQVSVEIEWELQKENSKRWNPEIQYTSNYNKSVNVDFTVDTNGVYSEPRPIGTRYLTRNL

SEQ ID NO: 1000 - protein, 736 aa, Artificial Sequence
  Synthetic polypeptide
MAADGYLPDWLEDNLSEGIREWWDLKPGAPKPKANQQKQDDGRGLVLPGYKYLGPFNGLDKGEPVNAADAAALEHDKAYDQQLKAGDNPYLRYNHADAEFQERLQEDTSFGGNLGRAVFQAKKRVLEPFGLVEEGAKTAPGKKRPVEQSPQEPDSSSGIGKTGQQPAKKRLNFGQTGDSESVPDPQPLGEPPATPAAVGPTTMASGGGAPMADNNEGADGVGNASGNWHCDSTWLGDRVITTSTRTWALPTYNNHLYKQISSASTGASNDNHYFGYSTPWGYFDFNRFHCHFSPRDWQRLINNNWGFRPKRLNFKLFNVQVKEVTTNDGVTTIANNLTSTVQVFSDSEYQLPYVLGSAHQGCLPPFPADVFMIPQYGYLTLNNGSQAVGRSSFYCLEYFPSQMLRTGNNFTFSYTFEDVPFHSSYAHSQSLDRLMNPLIDQYLYYLNRTQDQSGSAQNKDLLFSRGSPAGMSVQPKNWLPGPCYRQQRVSKTKTDNNNSNFTWTGASKYNLNGRESIINPGTAMASHKDDKNKFFPMSGVMIFGKESAGASNTALDNVMITDEEEIKATNPVATERFGTVAVNLQSSSTDPATGDVHVMGALPGMVWQDRDVYLQGPIWAKIPHTDGHFHPSPLMGGFGLKNPPPQILIKNTPVPANPPAEFSATKFASFITQYSTGQVSVEIEWELQKENSKRWNPEVQYTSNYAKSANVDFTVDNNGLYTEPRPIGTRYLTRPL

SEQ ID NO: 1001 - protein, 737 aa, Artificial Sequence
  Synthetic polypeptide
MAADGYLPDWLEDTLSEGIRQWWKLKPGPPPPKPAERHKDDSRGLVLPGYKYLGPGNGLDKGEPVNAADAAALEHDKAYDQQLKAGDNPYLKYNHADAEFQERLKEDTSFGGNLGRAVFQAKKRVLEPLGLVEEGAKTAPGKKRPVEPSPQRSPDSSTGIGKKGQQPARKRLNFGQTGDSESVPDPQPLGEPPATPAAVGPTTMASGGGAPMADNNEGADGVGNASGNWHCDSTWLGDRVITTSTRTWALPTYNNHLYKQISSASTGASNDNHYFGYSTPWGYFDFNRFHCHFSPRDWQRLINNNWGFRPKRLNFKLFNIQVKEVTTNDGVTTIANNLTSTVQVFSDSEYQLPYVLGSAHQGCLPPFPADVFMIPQYGYLTLNNGSQAVGRSSFYCLEYFPSQMLRTGNNFTFSYTFEDVPFHSSYAHSQSLDRLMNPLIDQYLYYLNRTQNQSGSAQNKDLLFSRGSPAGMSVQPKNWLPGPCYRQQRVSKTKTDNNNSNFTWTGASKYNLNGRESIINPGTAMASHKDDKDKFFPMSGVMIFGKESAGASNTALDNVMITDEEEIKATNPVATERFGTVAVNLQSSSTDPATEDVHVMGALPGMVWQDRDVYLQGPIWAKIPHTDGHFHPSPLMGGFGLKNPPPQILIKNTPVPANPPAEFSATKFASFITQYSTGQVSVEIEWELQKENSKRWNPEVQYTSNYAKSANVDFTVDNNGLYTEPRPIGTRYLTRNL

SEQ ID NO: 1002 - protein, 736 aa, Artificial Sequence
  Synthetic polypeptide
MAADGYLPDWLEDNLSEGIREWWDLKPGAPKPKANQQKQDDGRGLVLPGYKYLGPFNGLDKGEPVNAADAAALEHDKAYDQQLKAGDNPYLRYNHADAEFQERLQEDTSFGGNLGRAVFQAKKRVLEPFGLVEEGAKTAPGKKRPVEQSPQEPDSSSGIGKTGQQPAKKRLNFGQTGDSESVPDPQPLGEPPATPAAVGPTTMASGGGAPMADNNEGADGVGNASGNWHCDSTWLGDRVITTSTRTWALPTYNNHLYKQISSASTGASNDNHYFGYSTPWGYFDFNRFHCHFSPRDWQRLINNNWGFRPKRLNFKLFNVQVKEVTTNDGVTTIANNLTSTVQVFSDSEYQLPYVLGSAHQGCLPPFPADVFMIPQYGYLTLNNGSQAVGRSSFYCLEYFPSQMLRTGNNFTFSYTFEDVPFHSSYAHSQSLDRLMNPLIDQYLYYLNRTQDQSGSAQNKDLLFSRGSPAGMSVQPKNWLPGPCYRQQRVSKTKTDNNNSNFTWTGASKYNLNGRESIINPGTAMASHKDDKNKFFPMSGVMIFGKESAGASNTALDNVMITDEEEIKATNPVATERFGTVAVNLQSSSTDPATGDVHVMGALPGMVWQDRDVYLQGPIWAKIPHTDGHFHPSPLMGGFGLKHPPPQILIKNTPVPANPPAEFSATKFASFITQYSTGQVSVEIEWELQKENSKRWNPEVQYTSNYAKSANVDFTVDNNGLYTEPRPIGTRYLTRPL

SEQ ID NO: 1003 - protein, 736 aa, Artificial Sequence
  Synthetic polypeptide
MAADGYLPDWLEDNLSEGIREWWDLKPGAPKPKANQQKQDDGRGLVLPGYKYLGPFNGLDKGEPVNAADAAALEHDKAYDQQLKAGDNPYLRYNHADAEFQERLQEDTSFGGNLGRAVFQAKKRVLEPFGLVEEGAKTAPGKKRPVEQSPQEPDSSSGIGKTGQQPAKKRLNFGQTGDSESVPDPQPLGEPPATPAAVGPTTMASGGGAPMADNNEGADGVGNASGNWHCDSTWLGDRVITTSTRTWALPTYNNHLYKQISSASTGASNDNHYFGYSTPWGYFDFNRFHCHFSPRDWQRLINNNWGFRPKRLNFKLFNVQVKEVTTNDGVTTIANNLTSTVQVFSDSEYQLPYVLGSAHQGCLPPFPADVFMIPQYGYLTLNNGSQAVGRSSFYCLEYFPSQMLRTGNNFTFSYTFEDVPFHSSYAHSQSLDRLMNPLIDQYLYYLNRTQDQSGSAQNKDLLFSRGSPAGMSVQPKNWLPGPCYRQQRVSKTKTDNNNSNFTWTGASKYNLNGRESIINPGTAMASHKDDKDKFFPMSGVMIFGKESAGASNTALDNVMITDEEEIKATNPVATERFGTVAVNLQSSSTDPATGDVHVMGALPGMVWQDRDVYLQGPIWAKIPHTDGHFHPSPLMGGFGLKHPPPQILIKNTPVPANPPAEFSATKFASFITQYSTGQVSVEIEWELQKENSKRWNPEVQYTSNYAKSANVDFTVDNNGLYTEPRPIGTRYLTRPL

SEQ ID NO: 1004 - protein, 736 aa, Artificial Sequence
  Synthetic polypeptide
MAADGYLPDWLEDNLSEGIREWWDLKPGAPKPKANQQKQDDGRGLVLPGYKYLGPFNGLDKGEPVNAADAAALEHDKAYDQQLKAGDNPYLRYNHADAEFQERLQEDTSFGGNLGRAVFQAKKRVLEPFGLVEEGAKTAPGKKRPVEQSPQEPDSSSGIGKTGQQPAKKRLNFGQTGDSESVPDPQPLGEPPATPAAVGPTTMASGGGAPMADNNEGADGVGNASGNWHCDSTWLGDRVITTSTRTWALPTYNNHLYKQISSASTGASNDNHYFGYSTPWGYFDFNRFHCHFSPRDWQRLINNNWGFRPKRLNFKLFNIQVKEVTTNDGVTTIANNLTSTVQVFSDSEYQLPYVLGSAHQGCLPPFPADVFMIPQYGYLTLNNGSQAVGRSSFYCLEYFPSQMLRTGNNFTFSYTFEDVPFHSSYAHSQSLDRLMNPLIDQYLYYLNRTQDQSGSAQNKDLLFSRGSPAGMSVQPKNWLPGPCYRQQRVSKTKTDNNNSNFTWTGASKYNLNGRESIINPGTAMASHKDDKNKFFPMSGVMIFGKESAGASNTALDNVMITDEEEIKATNPVATERFGTVAVNLQSSSTDPATGDVHVMGALPGMVWQDRDVYLQGPIWAKIPHTDGHFHPSPLMGGFGLKHPPPQILIKNTPVPANPPAEFSATKFASFITQYSTGQVSVEIEWELQKENSKRWNPEVQYTSNYAKSANVDFTVDNNGLYTEPRPIGTRYLTRPL

SEQ ID NO: 1005 - protein, 736 aa, Artificial Sequence
  Synthetic polypeptide
MAADGYLPDWLEDNLSEGIREWWDLKPGAPKPKANQQKQDDGRGLVLPGYKYLGPFNGLDKGEPVNAADAAALEHDKAYDQQLKAGDNPYLRYNHADAEFQERLQEDTSFGGNLGRAVFQAKKRVLEPFGLVEEGAKTAPGKKRPVEQSPQEPDSSSGIGKTGQQPAKKRLNFGQTGDSESVPDPQPLGEPPATPAAVGPTTMASGGGAPMADNNEGADGVGNASGNWHCDSTWLGDRVITTSTRTWALPTYNNHLYKQISSASTGASNDNHYFGYSTPWGYFDFNRFHCHFSPRDWQRLINNNWGFRPKRLNFKLFNVQVKEVTTNDGVTTIANNLTSTVQVFSDSEYQLPYVLGSAHQGCLPPFPADVFMIPQYGYLTLNNGSQAVGRSSFYCLEYFPSQMLRTGNNFTFSYTFEDVPFHSSYAHSQSLDRLMNPLIDQYLYYLNRTQNQSGSAQNKDLLFSRGSPAGMSVQPKNWLPGPCYRQQRVSKTKTDNNNSNFTWTGASKYNLNGRESIINPGTAMASHKDDKDKFFPMSGVMIFGKESAGASNTALDNVMITDEEEIKATNPVATERFGTVAVNLQSSSTDPATGDVHVMGALPGMVWQDRDVYLQGPIWAKIPHTDGHFHPSPLMGGFGLKHPPPQILIKNTPVPANPPAEFSATKFASFITQYSTGQVSVEIEWELQKENSKRWNPEVQYTSNYAKSANVDFTVDNNGLYTEPRPIGTRYLTRPL

SEQ ID NO: 1006 - protein, 736 aa, Artificial Sequence
  Synthetic polypeptide
MAADGYLPDWLEDNLSEGIREWWDLKPGAPKPKANQQKQDDGRGLVLPGYKYLGPFNGLDKGEPVNAADAAALEHDKAYDQQLKAGDNPYLRYNHADAEFQERLQEDTSFGGNLGRAVFQAKKRVLEPFGLVEEGAKTAPGKKRPVEQSPQEPDSSSGIGKTGQQPAKKRLNFGQTGDSESVPDPQPLGEPPATPAAVGPTTMASGGGAPMADNNEGADGVGNASGNWHCDSTWLGDRVITTSTRTWALPTYNNHLYKQISSASTGASNDNHYFGYSTPWGYFDFNRFHCHFSPRDWQRLINNNWGFRPKRLNFKLFNVQVKEVTTNDGVTTIANNLTSTVQVFSDSEYQLPYVLGSAHQGCLPPFPADVFMIPQYGYLTLNNGSQAVGRSSFYCLEYFPSQMLRTGNNFTFSYTFEDVPFHSSYAHSQSLDRLMNPLIDQYLYYLNRTQNQSGSAQNKDLLFSRGSPAGMSVQPKNWLPGPCYRQQRVSKTKTDNNNSNFTWTGASKYNLNGRESIINPGTAMASHKDDKNKFFPMSGVMIFGKESAGASNTALDNVMITDEEEIKATNPVATERFGTVAVNLQSSSTDPATGDVHVMGALPGMVWQDRDVYLQGPIWAKIPHTDGHFHPSPLMGGFGLKHPPPQILIKNTPVPANPPAEFSATKFASFITQYSTGQVSVEIEWELQKENSKRWNPEVQYTSNYAKSANVDFTVDNNGLYTEPRPIGTRYLTRPL

SEQ ID NO: 1007 - DNA, 2217 bp, Artificial Sequence
  Synthetic polynucleotide
atggctgccgatggttatcttccagattggctcgaggacaacctctctgagggcattcgcgagtggtgggacctgaaacctggagccccgaaacccaaagccaaccagcaaaagcaggacaacggccggggtctggtgcttcctggctacaagtacctcggacccttcaacggactcgacaagggggagcccgtcaacgcggcggacgcagcggccctcgagcacgacaaggcctacgaccagcagctccaagcgggtgacaatccgtacctgcggtataatcacgccgacgccgagtttcaggagcgtctgcaagaagatacgtcttttgggggcaacctcgggcgcgcagtcttccaggccaaaaagcgggttctcgaacctctgggcctggttgaatcgccggttaagacggctcctggaaagaagagaccggtagagccatcaccccagcgctctccagactcctctacgggcatcggcaagaaaggccagcagcccgcaaaaaagagactcaattttgggcagactggcgactcagagtcagtccccgaccctcaaccaatcggagaaccaccagcaggcccctctggtctgggatctggtacaatggctgcaggcggtggcgctccaatggcagacaataacgaaggcgccgacggagtgggtagttcctcaggaaattggcattgcgattccacatggctgggcgacagagtcatcaccaccagcacccgcacctgggccctgcccacctacaacaaccacctctacaagcaaatctccaacgggacctcgggaggaagcaccaacgacaacacctacttcggctacagcaccccctgggggtattttgacttcaacagattccactgccacttttcaccacgtgactggcagcgactcatcaacaacaactggggattccggcccaagaggctcaacttcaagctcttcaacatccaagtcaaggaggtcacgcagaatgaaggcaccaagaccatcgccaataaccttaccagcacgattcaggtctttacggactcggaataccagctcccgtacgtgctcggctcggcgcaccagggctgcctgcctccgttcccggcggacgtcttcatgattcctcagtacgggtacctgactctgaacaatggcagtcaggctgtgggccggtcgtccttctactgcctggagtactttccttctcaaatgctgagaacgggcaacaactttgaattcagctacaacttcgaggacgtgcccttccacagcagctacgcgcacagccagagcctggaccggctgatgaaccctctcatcgaccagtacttgtactacctgtcccggactcaaagcacgggcggtactgcaggaactcagcagttgctattttctcaggccgggcctaacaacatgtcggctcaggccaagaactggctacccggtccctgctaccggcagcaacgcgtctccacgacactgtcgcagaacaacaacagcaactttgcctggacgggtgccaccaagtatcatctgaatggcagagactctctggtgaatcctggcgttgccatggctacccacaaggacgacgaagagcgattttttccatccagcggagtcttaatgtttgggaaacagggagctggaaaagacaacgtggactatagcagcgtgatgctaaccagcgaggaagaaataaagaccaccaacccagtggccacagaacagtacggcgtggtggccgataacctgcaacagcaaaacgccgctcctattgtaggggccgtcaatagtcaaggagccttacctggcatggtgtggcagaaccgggacgtgtacctgcagggtcccatctgggccaagattcctcatacggacggcaactttcatccctcgccgctgatgggaggctttggactgaagcatccgcctcctcagatcctgattaaaaacacacctgttcccgcggatcctccgaccaccttcaatcaggccaagctggcttctttcatcacgcagtacagtaccggccaggtcagcgtggagatcgagtgggagctgcagaaggagaacagcaaacgctggaacccagagattcagtacacttccaactactacaaatctacaaatgtggactttgctgtcaatactgagggtacttattccgagcctcgccccattggcacccgttacctcacccgtaatctgtaa

SEQ ID NO: 1008 - protein, 738 aa, Artificial Sequence
  Synthetic polypeptide
MAADGYLPDWLEDNLSEGIREWWDLKPGAPKPKANQQKQDNGRGLVLPGYKYLGPFNGLDKGEPVNAADAAALEHDKAYDQQLQAGDNPYLRYNHADAEFQERLQEDTSFGGNLGRAVFQAKKRVLEPLGLVESPVKTAPGKKRPVEPSPQRSPDSSTGIGKKGQQPAKKRLNFGQTGDSESVPDPQPIGEPPAGPSGLGSGTMAAGGGAPMADNNEGADGVGSSSGNWHCDSTWLGDRVITTSTRTWALPTYNNHLYKQISNGTSGGSTNDNTYFGYSTPWGYFDFNRFHCHFSPRDWQRLINNNWGFRPKRLNFKLFNIQVKEVTQNEGTKTIANNLTSTIQVFTDSEYQLPYVLGSAHQGCLPPFPADVFMIPQYGYLTLNNGSQAVGRSSFYCLEYFPSQMLRTGNNFEFSYNFEDVPFHSSYAHSQSLDRLMNPLIDQYLYYLSRTQSTGGTAGTQQLLFSQAGPNNMSAQAKNWLPGPCYRQQRVSTTLSQNNNSNFAWTGATKYHLNGRDSLVNPGVAMATHKDDEERFFPSSGVLMFGKQGAGKDNVDYSSVMLTSEEEIKTTNPVATEQYGVVADNLQQQNAAPIVGAVNSQGALPGMVWQNRDVYLQGPIWAKIPHTDGNFHPSPLMGGFGLKHPPPQILIKNTPVPADPPTTFNQAKLASFITQYSTGQVSVEIEWELQKENSKRWNPEIQYTSNYYKSTNVDFAVNTEGTYSEPRPIGTRYLTRNL

SEQ ID NO: 1009 - protein, 738 aa, Artificial Sequence; identical to SEQ ID NO: 1008
  Synthetic polypeptide

SEQ ID NO: 1010 - DNA, 4472 bp, Artificial Sequence
  Synthetic polynucleotide
ctccatcactaggggtaaccgcgaagcgcctcccacgctgccgcgtcagcgctgacgtaaattacgtcataggggagtggtcctgtattagctgtcacgtgagtgcttttgcgacattttgcgacaccacgtggccattcatggtatatatggccgagtgagcgagcaggatctccattttgaccgcgaaatttgaacgagcagcagccatgccgggcttctacgagatcgtgcttaaggtgccgagcgacctggacgagcacctgccgggcatttctgactcgtttgtgaactgggtggcagagaaggaatgggagctgcccccggattctgacatggatcggaatctgattgagcaggcacccctgaccgtggccgagaagctacagcgcgacttcctggtccaatggcgccgcgtgagtaaggccccggaggccctcttctttgttcagttcgagaagggcgagtcctacttccacctccatattctggtagagaccacgggggtcaaatccatggtgctgggccgcttcctgagtcagattcgggacaagctggtgcagaccatctaccgcgggatcgagccgaccctgcccaactggttcgcggtgacaaagacgcgtaatggcgccggaggggggaacaaggtggtggacgagtgctacatccccaactacctgctgcccaagactcagcccgagctgcagtgggcgtggactaacatggaggagtatataagcgcgtgcttgaacctggccgagcgcaaacggctcgtggcgcagcacctgacccacgtcagccagacccaggagcagaacaaggagaatctgaacccgaattctgacgcgcctgtcatccggtcaaaaacctccgcgcgctacatggagctggtcgggtggctggtggaccggggcatcacctccgagaagcagtggatccaggaggaccaggcctcgtacatctccttcaacgccgcctccaactcgcggtctcagatcaaggccgcgctggacaatgccggcaagatcatggcgctgaccaaatccgcgcccgactacctggtaggccccgctctgcccgcggacattaaatccaaccgcatctaccgcatcctggagctgaatggctacgaccctgcctacgccggttccgtctttctcggctgggcccagaaaaagtttggcaaaaggaacaccatctggctgtttgggccggccaccacgggcaagaccaacatcgcggaagccatcgcccacgccgtgcccttctacggctgcgtcaactggaccaatgagaactttcccttcaacgattgcgtcgacaagatggtgatctggtgggaggagggcaagatgacggccaaggtcgtggagtccgccaaggccattctcggcggcagcaaggtgcgcgtggaccaaaagtgcaagtcgtccgcccagatcgatcccacccccgtgatcgtcacctccaacaccaacatgtgcgccgtgattgacgggaacagcaccaccttcgagcaccagcagccgttgcaggaccggatgttcaaatttgaacttacccgccgtctggagcacgactttggcaaggtgacaaagcaggaagtcaaagagttcttccgctgggcgcaggatcacgtgaccgaggtggcgcatgagttctacgtcagaaagggtggagctaacaaaagacccgcccccgatgacgcggatataagcgagcccaagcgggcctgcccctcagtcgcggatccatcgacgtcagacgcggaaggagctccggtggactttgccgacaggtaccaaaacaaatgttctcgtcacgcgggcatgcttcagatgctgtttccctgcaaaacatgcgagagaatgaatcagaatttcaacatttgcttcacgcacgggaccagagactgttcagaatgtttccctggcgtgtcagaatctcaaccggtcgtcagaaaaaagacgtatcggaaactctgtgcgattcatcatctgctggggcgggcacccgagattgcttgctcggcctgcgacctggtcaacgtggacctggatgactgtgtttctgagcaataaatgacttaaaccaggtatggctgccgatggttatcttccagattggctcgaggacaacctctctgagggcattcgcgagtggtgggacctgaaacctggagccccgaaacccaaagccaaccagcaaaagcaggacaacggccggggtctggtgcttcctggctacaagtacctcggacccttcaacggactcgacaagggggagcccgtcaacgcggcggacgcagcggccctcgagcacgacaaggcctacgaccagcagctccaagcgggtgacaatccgtacctgcggtataatcacgccgacgccgagtttcaggagcgtctgcaagaagatacgtcttttgggggcaacctcgggcgcgcagtcttccaggccaaaaagcgggttctcgaacctctgggcctggttgaatcgccggttaagacggctcctggaaagaagagaccggtagagccatcaccccagcgctctccagactcctctacgggcatcggcaagaaaggccagcagcccgcaaaaaagagactcaattttgggcagactggcgactcagagtcagtccccgaccctcaaccaatcggagaaccaccagcaggcccctctggtctgggatctggtacaatggctgcaggcggtggcgctccaatggcagacaataacgaaggcgccgacggagtgggtagttcctcaggaaattggcattgcgattccacatggctgggcgacagagtcatcaccaccagcacccgcacctgggccctgcccacctacaacaaccacctctacaagcaaatctccaacgggacctcgggaggaagcaccaacgacaacacctacttcggctacagcaccccctgggggtattttgacttcaacagattccactgccacttttcaccacgtgactggcagcgactcatcaacaacaactggggattccggcccaagaggctcaacttcaagctcttcaacatccaagtcaaggaggtcacgcagaatgaaggcaccaagaccatcgccaataaccttaccagcacgattcaggtctttacggactcggaataccagctcccgtacgtgctcggctcggcgcaccagggctgcctgcctccgttcccggcggacgtcttcatgattcctcagtacgggtacctgactctgaacaatggcagtcaggctgtgggccggtcgtccttctactgcctggagtactttccttctcaaatgctgagaacgggcaacaactttgaattcagctacaacttcgaggacgtgcccttccacagcagctacgcgcacagccagagcctggaccggctgatgaaccctctcatcgaccagtacttgtactacctgtcccggactcaaagcacgggcggtactgcaggaactcagcagttgctattttctcaggccgggcctaacaacatgtcggctcaggccaagaactggctacccggtccctgctaccggcagcaacgcgtctccacgacactgtcgcagaacaacaacagcaactttgcctggacgggtgccaccaagtatcatctgaatggcagagactctctggtgaatcctggcgttgccatggctacccacaaggacgacgaagagcgattttttccatccagcggagtcttaatgtttgggaaacagggagctggaaaagacaacgtggactatagcagcgtgatgctaaccagcgaggaagaaataaagaccaccaacccagtggccacagaacagtacggcgtggtggccgataacctgcaacagcaaaacgccgctcctattgtaggggccgtcaatagtcaaggagccttacctggcatggtgtggcagaaccgggacgtgtacctgcagggtcccatctgggccaagattcctcatacggacggcaactttcatccctcgccgctgatgggaggctttggactgaagcatccgcctcctcagatcctgattaaaaacacacctgttcccgcggatcctccgaccaccttcaatcaggccaagctggcttctttcatcacgcagtacagtaccggccaggtcagcgtggagatcgagtgggagctgcagaaggagaacagcaaacgctggaacccagagattcagtacacttccaactactacaaatctacaaatgtggactttgctgtcaatactgagggtacttattccgagcctcgccccattggcacccgttacctcacccgtaatctgtaattacatgttaatcaataaaccggttaattcgtttcagttgaactttggtctcctgtccttcttatcttatcggttaccatagaaactggttacttattaactgcttggtgcgcttcgcgataaaagacttacgtcatcgggttacccctagtgatgga

SEQ ID NO: 1011 - protein, 738 aa, Artificial Sequence
  Synthetic polypeptide
MAADGYLPDWLEDNLSEGIREWWDLKPGAPKPKANQQKQDNGRGLVLPGYKYLGPFNGLDKGEPVNAADAAALEHDKAYDQQLQAGDNPYLRYNHADAEFQERLQEDTSFGGNLGRAVFQAKKRVLEPLGLVESPVKTAPGKKRPVEPSPQRSPDSSTGIGKKGQQPAKKRLNFGQTGDSESVPDPQPIGEPPAAPSGVGPNTMAAGGGAPMADNNEGADGVGSSSGNWHCDSTWLGDRVITTSTRTWALPTYNNHLYKQISNGTSGGSTNDNTYFGYSTPWGYFDFNRFHCHFSPRDWQRLINNNWGFRPKRLNFKLFNIQVKEVTQNEGTKTIANNLTSTIQVFTDSEYQLPYVLGSAHQGCLPPFPADVFMIPQYGYLTLNNGSQAVGRSSFYCLEYFPSQMLRTGNNFEFSYNFEDVPFHSSYAHSQSLDRLMNPLIDQYLYYLSRTQSTGGTAGTQQLLFSQAGPNNMSAQAKNWLPGPCYRQQRVSTTLSQNNNSNFAWTGATKYHLNGRDSLVNPGVAMATHKDDEERFFPSSGVLMFGKQGAGKDNVDYSSVMLTSEEEIKTTNPVATEQYGVVADNLQQQNAAPIVGAVNSQGALPGMVWQNRDVYLQGPIWAKIPHTDGNFHPSPLMGGFGLKHPPPQILIKNTPVPADPPTTFNQAKLASFITQYSTGQVSVEIEWELQKENSKRWNPEIQYTSNYYKSTNVDFAVNTEGTYSEPRPIGTRYLTRNL

SEQ ID NO: 1012 - protein, 738 aa, Artificial Sequence
  Synthetic polypeptide
MAADGYLPDWLEDNLSEGIREWWDLKPGAPKPKANQQRQDNGRGLVLPGYRYLGPFNGLDKGEPVNAADAAALEHDRAYDQQLQAGDNPYLRYNHADAEFQERLQEDTSFGGNLGRAVFQAKKRVLEPLGLVESPVRTAPGKKRPVEPSPQRSPDSSTGIGKKGQQPARKRLNFGQTGDSESVPDPQPIGEPPAAPSGVGPNTMAAGGGAPMADNNEGADGVGSSSGNWHCDSTWLGDRVITTSTRTWALPTYNNHLYRQISNGTSGGSTNDNTYFGYSTPWGYFDFNRFHCHFSPRDWQRLINNNWGFRPKRLNFKLFNIQVKEVTQNEGTRTIANNLTSTIQVFTDSEYQLPYVLGSAHQGCLPPFPADVFMIPQYGYLTLNNGSQAVGRSSFYCLEYFPSQMLRTGNNFEFSYNFEDVPFHSSYAHSQSLDRLMNPLIDQYLYYLSRTQSTGGTAGTQQLLFSQAGPNNMSAQAKNWLPGPCYRQQRVSTTLSQNNNSNFAWTGATKYHLNGRDSLVNPGVAMATHRDDEERFFPSSGVLMFGRQGAGRDNVDYSSVMLTSEEEIRTTNPVATEQYGVVADNLQQQNAAPIVGAVNSQGALPGMVWQNRDVYLQGPIWAKIPHTDGNFHPSPLMGGFGLKHPPPQILIKNTPVPADPPTTFNQAKLASFITQYSTGQVSVEIEWELQKENSKRWNPEIQYTSNYYKSTNVDFAVNTEGTYSEPRPIGTRYLTRNL

SEQ ID NO: 1013 - protein, 738 aa, Artificial Sequence
  Synthetic polypeptide
MAADGYLPDWLEDNLSEGIREWWDLKPGAPKPKANQQRQDNGRGLVLPGYRYLGPFNGLDKGEPVNAADAAALEHDRAYDQQLQAGDNPYLRYNHADAEFQERLQEDTSFGGNLGRAVFQAKKRVLEPLGLVESPVRTAPGKKRPVEPSPQRSPDSSTGIGKRGQQPARKRLNFGQTGDSESVPDPQPIGEPPAAPSGVGPNTMAAGGGAPMADNNEGADGVGSSSGNWHCDSTWLGDRVITTSTRTWALPTYNNHLYRQISNGTSGGSTNDNTYFGYSTPWGYFDFNRFHCHFSPRDWQRLINNNWGFRPKRLNFKLFNIQVKEVTQNEGTRTIANNLTSTIQVFTDSEYQLPYVLGSAHQGCLPPFPADVFMIPQYGYLTLNNGSQAVGRSSFYCLEYFPSQMLRTGNNFEFSYNFEDVPFHSSYAHSQSLDRLMNPLIDQYLYYLSRTQSTGGTAGTQQLLFSQAGPNNMSAQAKNWLPGPCYRQQRVSTTLSQNNNSNFAWTGATKYHLNGRDSLVNPGVAMATHRDDEERFFPSSGVLMFGKQGAGRDNVDYSSVMLTSEEEIRTTNPVATEQYGVVADNLQQQNAAPIVGAVNSQGALPGMVWQNRDVYLQGPIWAKIPHTDGNFHPSPLMGGFGLKHPPPQILIKNTPVPADPPTTFNQAKLASFITQYSTGQVSVEIEWELQKENSKRWNPEIQYTSNYYKSTNVDFAVNTEGTYSEPRPIGTRYLTRNL

SEQ ID NO: 1014 - protein, 738 aa, Artificial Sequence
  Synthetic polypeptide
MAADGYLPDWLEDNLSEGIREWWDLKPGAPKPKANQQRQDNGRGLVLPGYRYLGPFNGLDKGEPVNAADAAALEHDRAYDQQLQAGDNPYLRYNHADAEFQERLQEDTSFGGNLGRAVFQAKKRVLEPLGLVESPVRTAPGKKRPVEPSPQRSPDSSTGIGKRGQQPAKKRLNFGQTGDSESVPDPQPIGEPPAAPSGVGPNTMAAGGGAPMADNNEGADGVGSSSGNWHCDSTWLGDRVITTSTRTWALPTYNNHLYRQISNGTSGGSTNDNTYFGYSTPWGYFDFNRFHCHFSPRDWQRLINNNWGFRPKRLNFKLFNIQVKEVTQNEGTRTIANNLTSTIQVFTDSEYQLPYVLGSAHQGCLPPFPADVFMIPQYGYLTLNNGSQAVGRSSFYCLEYFPSQMLRTGNNFEFSYNFEDVPFHSSYAHSQSLDRLMNPLIDQYLYYLSRTQSTGGTAGTQQLLFSQAGPNNMSAQAKNWLPGPCYRQQRVSTTLSQNNNSNFAWTGATKYHLNGRDSLVNPGVAMATHRDDEERFFPSSGVLMFGRQGAGRDNVDYSSVMLTSEEEIRTTNPVATEQYGVVADNLQQQNAAPIVGAVNSQGALPGMVWQNRDVYLQGPIWAKIPHTDGNFHPSPLMGGFGLKHPPPQILIKNTPVPADPPTTFNQAKLASFITQYSTGQVSVEIEWELQKENSKRWNPEIQYTSNYYKSTNVDFAVNTEGTYSEPRPIGTRYLTRNL

SEQ ID NO: 1015 - protein, 738 aa, Artificial Sequence
  Synthetic polypeptide
MAADGYLPDWLEDNLSEGIREWWDLKPGAPKPKANQQRQDNGRGLVLPGYRYLGPFNGLDKGEPVNAADAAALEHDRAYDQQLQAGDNPYLRYNHADAEFQERLQEDTSFGGNLGRAVFQAKKRVLEPLGLVESPVRTAPGKKRPVEPSPQRSPDSSTGIGKRGQQPAKKRLNFGQTGDSESVPDPQPIGEPPAAPSGVGPNTMAAGGGAPMADNNEGADGVGSSSGNWHCDSTWLGDRVITTSTRTWALPTYNNHLYRQISNGTSGGSTNDNTYFGYSTPWGYFDFNRFHCHFSPRDWQRLINNNWGFRPKRLNFKLFNIQVKEVTQNEGTRTIANNLTSTIQVFTDSEYQLPYVLGSAHQGCLPPFPADVFMIPQYGYLTLNNGSQAVGRSSFYCLEYFPSQMLRTGNNFEFSYNFEDVPFHSSYAHSQSLDRLMNPLIDQYLYYLSRTQSTGGTAGTQQLLFSQAGPNNMSAQAKNWLPGPCYRQQRVSTTLSQNNNSNFAWTGATKYHLNGRDSLVNPGVAMATHRDDEERFFPSSGVLMFGKQGAGRDNVDYSSVMLTSEEEIRTTNPVATEQYGVVADNLQQQNAAPIVGAVNSQGALPGMVWQNRDVYLQGPIWAKIPHTDGNFHPSPLMGGFGLKHPPPQILIKNTPVPADPPTTFNQARLASFITQYSTGQVSVEIEWELQKENSKRWNPEIQYTSNYYKSTNVDFAVNTEGTYSEPRPIGTRYLTRNL

SEQ ID NO: 1016 - protein, 738 aa, Artificial Sequence
  Synthetic polypeptide
MAADGYLPDWLEDNLSEGIREWWDLKPGAPKPKANQQRQDNGRGLVLPGYRYLGPFNGLDKGEPVNAADAAALEHDRAYDQQLQAGDNPYLRYNHADAEFQERLQEDTSFGGNLGRAVFQAKKRVLEPLGLVESPVRTAPGKKRPVEPSPQRSPDSSTGIGKKGQQPAKKRLNFGQTGDSESVPDPQPIGEPPAAPSGVGPNTMAAGGGAPMADNNEGADGVGSSSGNWHCDSTWLGDRVITTSTRTWALPTYNNHLYRQISNGTSGGSTNDNTYFGYSTPWGYFDFNRFHCHFSPRDWQRLINNNWGFRPKRLNFKLFNIQVKEVTQNEGTRTIANNLTSTIQVFTDSEYQLPYVLGSAHQGCLPPFPADVFMIPQYGYLTLNNGSQAVGRSSFYCLEYFPSQMLRTGNNFEFSYNFEDVPFHSSYAHSQSLDRLMNPLIDQYLYYLSRTQSTGGTAGTQQLLFSQAGPNNMSAQAKNWLPGPCYRQQRVSTTLSQNNNSNFAWTGATKYHLNGRDSLVNPGVAMATHRDDEERFFPSSGVLMFGRQGAGRDNVDYSSVMLTSEEEIRTTNPVATEQYGVVADNLQQQNAAPIVGAVNSQGALPGMVWQNRDVYLQGPIWAKIPHTDGNFHPSPLMGGFGLKHPPPQILIKNTPVPADPPTTFNQARLASFITQYSTGQVSVEIEWELQKENSKRWNPEIQYTSNYYKSTNVDFAVNTEGTYSEPRPIGTRYLTRNL

SEQ ID NO: 1017 - DNA, 2214 bp, Artificial Sequence
  Synthetic polynucleotide
atggctgccgatggttatcttccagattggctcgaggacaacctctctgagggcattcgcgagtggtgggacctgaaacctggagccccgaaacccaaagccaaccagcaaaagcaggacaacggccggggtctggtgcttcctggctacaagtacctcggacccttcaacggactcgacaagggggagcccgtcaacgcggcggacgcagcggccctcgagcacgacaaggcctacgaccagcagctccaagcgggtgacaatccgtacctgcggtataatcacgccgacgccgagtttcaggagcgtctgcaagaagatacgtcttttgggggcaacctcgggcgcgcagtcttccaggccaaaaagcgggttctcgaacctctgggcctggttgaatcgccggttaagacggctcctggaaagaagagaccggtagagccatcaccccagcgctctccagactcctctacgggcatcggcaagaaaggccagcagcccgcaaaaaagagactcaattttgggcagactggcgactcagagtcagtccccgaccctcaaccaatcggagaaccaccagcagccccctctggtgtgggacctaatacaatggctgcaggcggtggcgctccaatggcagacaataacgaaggcgccgacggagtgggtagttcctcaggaaattggcattgcgattccacatggctgggcgacagagtcatcaccaccagcacccgcacctgggccctgcccacctacaacaaccacctctacaagcaaatctccaacgggacctcgggaggaagcaccaacgacaacacctacttcggctacagcaccccctgggggtattttgacttcaacagattccactgccacttttcaccacgtgactggcagcgactcatcaacaacaactggggattccggcccaagaggctcaacttcaagctcttcaacatccaagtcaaggaggtcacgcagaatgaaggcaccaagaccatcgccaataaccttaccagcacgattcaggtctttacggactcggaataccagctcccgtacgtgctcggctcggcgcaccagggctgcctgcctccgttcccggcggacgtcttcatgattcctcagtacgggtacctgactctgaacaatggcagtcaggctgtgggccggtcgtccttctactgcctggagtactttccttctcaaatgctgagaacgggcaacaactttgaattcagctacaacttcgaggacgtgcccttccacagcagctacgcgcacagccagagcctggaccggctgatgaaccctctcatcgaccagtacttgtactacctgtcccggactcaaagcacgggcggtactgcaggaactcagcagttgctattttctcaggccgggcctaacaacatgtcggctcaggccaagaactggctacccggtccctgctaccggcagcaacgcgtctccacgacactgtcgcagaacaacaacagcaactttgcctggacgggtgccaccaagtatcatctgaatggcagagactctctggtgaatcctggcgttgccatggctacccacaaggacgacgaagagcgattttttccatccagcggagtcttaatgtttgggaaacagggagctggaaaagacaacgtggactatagcagcgtgatgctaaccagcgaggaagaaataaagaccaccaacccagtggccacagaacagtacggcgtggtggccgataacctgcaacagcaaaacgccgctcctattgtaggggccgtcaatagtcaaggagccttacctggcatggtgtggcagaaccgggacgtgtacctgcagggtcccatctgggccaagattcctcatacggacggcaactttcatccctcgccgctgatgggaggctttggactgaagcatccgcctcctcagatcctgattaaaaacacacctgttcccgcggatcctccgaccaccttcaatcaggccaagctggcttctttcatcacgcagtacagtaccggccaggtcagcgtggagatcgagtgggagctgcagaaggagaacagcaaacgctggaacccagagattcagtacacttccaactactacaaatctacaaatgtggactttgctgtcaatactgagggtacttattccgagcctcgccccattggcacccgttacctcacccgtaatctg

SEQ ID NO: 1018 - DNA, 2217 bp, Artificial Sequence
  Synthetic polynucleotide
atggctgccgatggttatcttccagattggctcgaggacaacctctctgagggcattcgcgagtggtgggacctgaaacctggagccccgaaacccaaagccaaccagcaaaggcaggacaacggccggggtctggtgcttcctggctacaggtacctcggacccttcaacggactcgacaagggggagcccgtcaacgcggcggacgcagcggccctcgagcacgacagggcctacgaccagcagctccaagcgggtgacaatccgtacctgcggtataatcacgccgacgccgagtttcaggagcgtctgcaagaagatacgtcttttgggggcaacctcgggcgcgcagtcttccaggccaaaaagcgggttctcgaacctctgggcctggttgaatcgccggttaggacggctcctggaaagaagagaccggtagagccatcaccccagcgctctccagactcctctacgggcatcggcaagaaaggccagcagcccgcaagaaagagactcaattttgggcagactggcgactcagagtcagtccccgaccctcaaccaatcggagaaccaccagcagccccctctggtgtgggacctaatacaatggctgcaggcggtggcgctccaatggcagacaataacgaaggcgccgacggagtgggtagttcctcaggaaattggcattgcgattccacatggctgggcgacagagtcatcaccaccagcacccgcacctgggccctgcccacctacaacaaccacctctacaggcaaatctccaacgggacctcgggaggaagcaccaacgacaacacctacttcggctacagcaccccctgggggtattttgacttcaacagattccactgccacttttcaccacgtgactggcagcgactcatcaacaacaactggggattccggcccaagaggctcaacttcaagctcttcaacatccaagtcaaggaggtcacgcagaatgaaggcaccaggaccatcgccaataaccttaccagcacgattcaggtctttacggactcggaataccagctcccgtacgtgctcggctcggcgcaccagggctgcctgcctccgttcccggcggacgtcttcatgattcctcagtacgggtacctgactctgaacaatggcagtcaggctgtgggccggtcgtccttctactgcctggagtactttccttctcaaatgctgagaacgggcaacaactttgaattcagctacaacttcgaggacgtgcccttccacagcagctacgcgcacagccagagcctggaccggctgatgaaccctctcatcgaccagtacttgtactacctgtcccggactcaaagcacgggcggtactgcaggaactcagcagttgctattttctcaggccgggcctaacaacatgtcggctcaggccaagaactggctacccggtccctgctaccggcagcaacgcgtctccacgacactgtcgcagaacaacaacagcaactttgcctggacgggtgccaccaagtatcatctgaatggcagagactctctggtgaatcctggcgttgccatggctacccacagggacgacgaagagcgattttttccatccagcggagtcttaatgtttgggagacagggagctggaagagacaacgtggactatagcagcgtgatgctaaccagcgaggaagaaataaggaccaccaacccagtggccacagaacagtacggcgtggtggccgataacctgcaacagcaaaacgccgctcctattgtaggggccgtcaatagtcaaggagccttacctggcatggtgtggcagaaccgggacgtgtacctgcagggtcccatctgggccaagattcctcatacggacggcaactttcatccctcgccgctgatgggaggctttggactgaagcatccgcctcctcagatcctgattaaaaacacacctgttcccgcggatcctccgaccaccttcaatcaggccaagctggcttctttcatcacgcagtacagtaccggccaggtcagcgtggagatcgagtgggagctgcagaaggagaacagcaaacgctggaacccagagattcagtacacttccaactactacaaatctacaaatgtggactttgctgtcaatactgagggtacttattccgagcctcgccccattggcacccgttacctcacccgtaatctgtaa

SEQ ID NO: 1019 - DNA, 2217 bp, Artificial Sequence
  Synthetic polynucleotide
atggctgccgatggttatcttccagattggctcgaggacaacctctctgagggcattcgcgagtggtgggacctgaaacctggagccccgaaacccaaagccaaccagcaaaggcaggacaacggccggggtctggtgcttcctggctacaggtacctcggacccttcaacggactcgacaagggggagcccgtcaacgcggcggacgcagcggccctcgagcacgacagggcctacgaccagcagctccaagcgggtgacaatccgtacctgcggtataatcacgccgacgccgagtttcaggagcgtctgcaagaagatacgtcttttgggggcaacctcgggcgcgcagtcttccaggccaaaaagcgggttctcgaacctctgggcctggttgaatcgccggttaggacggctcctggaaagaagagaccggtagagccatcaccccagcgctctccagactcctctacgggcatcggcaagagaggccagcagcccgcaagaaagagactcaattttgggcagactggcgactcagagtcagtccccgaccctcaaccaatcggagaaccaccagcagccccctctggtgtgggacctaatacaatggctgcaggcggtggcgctccaatggcagacaataacgaaggcgccgacggagtgggtagttcctcaggaaattggcattgcgattccacatggctgggcgacagagtcatcaccaccagcacccgcacctgggccctgcccacctacaacaaccacctctacaggcaaatctccaacgggacctcgggaggaagcaccaacgacaacacctacttcggctacagcaccccctgggggtattttgacttcaacagattccactgccacttttcaccacgtgactggcagcgactcatcaacaacaactggggattccggcccaagaggctcaacttcaagctcttcaacatccaagtcaaggaggtcacgcagaatgaaggcaccaggaccatcgccaataaccttaccagcacgattcaggtctttacggactcggaataccagctcccgtacgtgctcggctcggcgcaccagggctgcctgcctccgttcccggcggacgtcttcatgattcctcagtacgggtacctgactctgaacaatggcagtcaggctgtgggccggtcgtccttctactgcctggagtactttccttctcaaatgctgagaacgggcaacaactttgaattcagctacaacttcgaggacgtgcccttccacagcagctacgcgcacagccagagcctggaccggctgatgaaccctctcatcgaccagtacttgtactacctgtcccggactcaaagcacgggcggtactgcaggaactcagcagttgctattttctcaggccgggcctaacaacatgtcggctcaggccaagaactggctacccggtccctgctaccggcagcaacgcgtctccacgacactgtcgcagaacaacaacagcaactttgcctggacgggtgccaccaagtatcatctgaatggcagagactctctggtgaatcctggcgttgccatggctacccacagggacgacgaagagcgattttttccatccagcggagtcttaatgtttgggaaacagggagctggaagagacaacgtggactatagcagcgtgatgctaaccagcgaggaagaaataaggaccaccaacccagtggccacagaacagtacggcgtggtggccgataacctgcaacagcaaaacgccgctcctattgtaggggccgtcaatagtcaaggagccttacctggcatggtgtggcagaaccgggacgtgtacctgcagggtcccatctgggccaagattcctcatacggacggcaactttcatccctcgccgctgatgggaggctttggactgaagcatccgcctcctcagatcctgattaaaaacacacctgttcccgcggatcctccgaccaccttcaatcaggccaagctggcttctttcatcacgcagtacagtaccggccaggtcagcgtggagatcgagtgggagctgcagaaggagaacagcaaacgctggaacccagagattcagtacacttccaactactacaaatctacaaatgtggactttgctgtcaatactgagggtacttattccgagcctcgccccattggcacccgttacctcacccgtaatctgtaa

SEQ ID NO: 1020 - DNA, 2217 bp, Artificial Sequence
  Synthetic polynucleotide
atggctgccgatggttatcttccagattggctcgaggacaacctctctgagggcattcgcgagtggtgggacctgaaacctggagccccgaaacccaaagccaaccagcaaaggcaggacaacggccggggtctggtgcttcctggctacaggtacctcggacccttcaacggactcgacaagggggagcccgtcaacgcggcggacgcagcggccctcgagcacgacagggcctacgaccagcagctccaagcgggtgacaatccgtacctgcggtataatcacgccgacgccgagtttcaggagcgtctgcaagaagatacgtcttttgggggcaacctcgggcgcgcagtcttccaggccaaaaagcgggttctcgaacctctgggcctggttgaatcgccggttaggacggctcctggaaagaagagaccggtagagccatcaccccagcgctctccagactcctctacgggcatcggcaagagaggccagcagcccgcaaaaaagagactcaattttgggcagactggcgactcagagtcagtccccgaccctcaaccaatcggagaaccaccagcagccccctctggtgtgggacctaatacaatggctgcaggcggtggcgctccaatggcagacaataacgaaggcgccgacggagtgggtagttcctcaggaaattggcattgcgattccacatggctgggcgacagagtcatcaccaccagcacccgcacctgggccctgcccacctacaacaaccacctctacaggcaaatctccaacgggacctcgggaggaagcaccaacgacaacacctacttcggctacagcaccccctgggggtattttgacttcaacagattccactgccacttttcaccacgtgactggcagcgactcatcaacaacaactggggattccggcccaagaggctcaacttcaagctcttcaacatccaagtcaaggaggtcacgcagaatgaaggcaccaggaccatcgccaataaccttaccagcacgattcaggtctttacggactcggaataccagctcccgtacgtgctcggctcggcgcaccagggctgcctgcctccgttcccggcggacgtcttcatgattcctcagtacgggtacctgactctgaacaatggcagtcaggctgtgggccggtcgtccttctactgcctggagtactttccttctcaaatgctgagaacgggcaacaactttgaattcagctacaacttcgaggacgtgcccttccacagcagctacgcgcacagccagagcctggaccggctgatgaaccctctcatcgaccagtacttgtactacctgtcccggactcaaagcacgggcggtactgcaggaactcagcagttgctattttctcaggccgggcctaacaacatgtcggctcaggccaagaactggctacccggtccctgctaccggcagcaacgcgtctccacgacactgtcgcagaacaacaacagcaactttgcctggacgggtgccaccaagtatcatctgaatggcagagactctctggtgaatcctggcgttgccatggctacccacagggacgacgaagagcgattttttccatccagcggagtcttaatgtttgggagacagggagctggaagagacaacgtggactatagcagcgtgatgctaaccagcgaggaagaaataaggaccaccaacccagtggccacagaacagtacggcgtggtggccgataacctgcaacagcaaaacgccgctcctattgtaggggccgtcaatagtcaaggagccttacctggcatggtgtggcagaaccgggacgtgtacctgcagggtcccatctgggccaagattcctcatacggacggcaactttcatccctcgccgctgatgggaggctttggactgaagcatccgcctcctcagatcctgattaaaaacacacctgttcccgcggatcctccgaccaccttcaatcaggccaagctggcttctttcatcacgcagtacagtaccggccaggtcagcgtggagatcgagtgggagctgcagaaggagaacagcaaacgctggaacccagagattcagtacacttccaactactacaaatctacaaatgtggactttgctgtcaatactgagggtacttattccgagcctcgccccattggcacccgttacctcacccgtaatctgtaa

SEQ ID NO: 1021 - DNA, 2217 bp, Artificial Sequence
  Synthetic polynucleotide
atggctgccgatggttatcttccagattggctcgaggacaacctctctgagggcattcgcgagtggtgggacctgaaacctggagccccgaaacccaaagccaaccagcaaaggcaggacaacggccggggtctggtgcttcctggctacaggtacctcggacccttcaacggactcgacaagggggagcccgtcaacgcggcggacgcagcggccctcgagcacgacagggcctacgaccagcagctccaagcgggtgacaatccgtacctgcggtataatcacgccgacgccgagtttcaggagcgtctgcaagaagatacgtcttttgggggcaacctcgggcgcgcagtcttccaggccaaaaagcgggttctcgaacctctgggcctggttgaatcgccggttaggacggctcctggaaagaagagaccggtagagccatcaccccagcgctctccagactcctctacgggcatcggcaagagaggccagcagcccgcaaaaaagagactcaattttgggcagactggcgactcagagtcagtccccgaccctcaaccaatcggagaaccaccagcagccccctctggtgtgggacctaatacaatggctgcaggcggtggcgctccaatggcagacaataacgaaggcgccgacggagtgggtagttcctcaggaaattggcattgcgattccacatggctgggcgacagagtcatcaccaccagcacccgcacctgggccctgcccacctacaacaaccacctctacaggcaaatctccaacgggacctcgggaggaagcaccaacgacaacacctacttcggctacagcaccccctgggggtattttgacttcaacagattccactgccacttttcaccacgtgactggcagcgactcatcaacaacaactggggattccggcccaagaggctcaacttcaagctcttcaacatccaagtcaaggaggtcacgcagaatgaaggcaccaggaccatcgccaataaccttaccagcacgattcaggtctttacggactcggaataccagctcccgtacgtgctcggctcggcgcaccagggctgcctgcctccgttcccggcggacgtcttcatgattcctcagtacgggtacctgactctgaacaatggcagtcaggctgtgggccggtcgtccttctactgcctggagtactttccttctcaaatgctgagaacgggcaacaactttgaattcagctacaacttcgaggacgtgcccttccacagcagctacgcgcacagccagagcctggaccggctgatgaaccctctcatcgaccagtacttgtactacctgtcccggactcaaagcacgggcggtactgcaggaactcagcagttgctattttctcaggccgggcctaacaacatgtcggctcaggccaagaactggctacccggtccctgctaccggcagcaacgcgtctccacgacactgtcgcagaacaacaacagcaactttgcctggacgggtgccaccaagtatcatctgaatggcagagactctctggtgaatcctggcgttgccatggctacccacagggacgacgaagagcgattttttccatccagcggagtcttaatgtttgggaaacagggagctggaagagacaacgtggactatagcagcgtgatgctaaccagcgaggaagaaataaggaccaccaacccagtggccacagaacagtacggcgtggtggccgataacctgcaacagcaaaacgccgctcctattgtaggggccgtcaatagtcaaggagccttacctggcatggtgtggcagaaccgggacgtgtacctgcagggtcccatctgggccaagattcctcatacggacggcaactttcatccctcgccgctgatgggaggctttggactgaagcatccgcctcctcagatcctgattaaaaacacacctgttcccgcggatcctccgaccaccttcaatcaggccaggctggcttctttcatcacgcagtacagtaccggccaggtcagcgtggagatcgagtgggagctgcagaaggagaacagcaaacgctggaacccagagattcagtacacttccaactactacaaatctacaaatgtggactttgctgtcaatactgagggtacttattccgagcctcgccccattggcacccgttacctcacccgtaatctgtaa

SEQ ID NO: 1022 - DNA, 2217 bp, Artificial Sequence
  Synthetic polynucleotide
atggctgccgatggttatcttccagattggctcgaggacaacctctctgagggcattcgcgagtggtgggacctgaaacctggagccccgaaacccaaagccaaccagcaaaggcaggacaacggccggggtctggtgcttcctggctacaggtacctcggacccttcaacggactcgacaagggggagcccgtcaacgcggcggacgcagcggccctcgagcacgacagggcctacgaccagcagctccaagcgggtgacaatccgtacctgcggtataatcacgccgacgccgagtttcaggagcgtctgcaagaagatacgtcttttgggggcaacctcgggcgcgcagtcttccaggccaaaaagcgggttctcgaacctctgggcctggttgaatcgccggttaggacggctcctggaaagaagagaccggtagagccatcaccccagcgctctccagactcctctacgggcatcggcaagaaaggccagcagcccgcaaaaaagagactcaattttgggcagactggcgactcagagtcagtccccgaccctcaaccaatcggagaaccaccagcagccccctctggtgtgggacctaatacaatggctgcaggcggtggcgctccaatggcagacaataacgaaggcgccgacggagtgggtagttcctcaggaaattggcattgcgattccacatggctgggcgacagagtcatcaccaccagcacccgcacctgggccctgcccacctacaacaaccacctctacaggcaaatctccaacgggacctcgggaggaagcaccaacgacaacacctacttcggctacagcaccccctgggggtattttgacttcaacagattccactgccacttttcaccacgtgactggcagcgactcatcaacaacaactggggattccggcccaagaggctcaacttcaagctcttcaacatccaagtcaaggaggtcacgcagaatgaaggcaccaggaccatcgccaataaccttaccagcacgattcaggtctttacggactcggaataccagctcccgtacgtgctcggctcggcgcaccagggctgcctgcctccgttcccggcggacgtcttcatgattcctcagtacgggtacctgactctgaacaatggcagtcaggctgtgggccggtcgtccttctactgcctggagtactttccttctcaaatgctgagaacgggcaacaactttgaattcagctacaacttcgaggacgtgcccttccacagcagctacgcgcacagccagagcctggaccggctgatgaaccctctcatcgaccagtacttgtactacctgtcccggactcaaagcacgggcggtactgcaggaactcagcagttgctattttctcaggccgggcctaacaacatgtcggctcaggccaagaactggctacccggtccctgctaccggcagcaacgcgtctccacgacactgtcgcagaacaacaacagcaactttgcctggacgggtgccaccaagtatcatctgaatggcagagactctctggtgaatcctggcgttgccatggctacccacagggacgacgaagagcgattttttccatccagcggagtcttaatgtttgggagacagggagctggaagagacaacgtggactatagcagcgtgatgctaaccagcgaggaagaaataaggaccaccaacccagtggccacagaacagtacggcgtggtggccgataacctgcaacagcaaaacgccgctcctattgtaggggccgtcaatagtcaaggagccttacctggcatggtgtggcagaaccgggacgtgtacctgcagggtcccatctgggccaagattcctcatacggacggcaactttcatccctcgccgctgatgggaggctttggactgaagcatccgcctcctcagatcctgattaaaaacacacctgttcccgcggatcctccgaccaccttcaatcaggccaggctggcttctttcatcacgcagtacagtaccggccaggtcagcgtggagatcgagtgggagctgcagaaggagaacagcaaacgctggaacccagagattcagtacacttccaactactacaaatctacaaatgtggactttgctgtcaatactgagggtacttattccgagcctcgccccattggcacccgttacctcacccgtaatctgtaa

SEQ ID NO: 1023 - protein, 744 aa, Artificial Sequence
  Synthetic polypeptide
MAADGYLPDWLEDTLSEGIRQWWKLKPGPPPPKPAERHKDDSRGLVLPGYKYLGPFNGLDKGEPVNEADAAALEHDKAYDRQLDSGDNPYLKYNHADAEFQERLKEDTSFGGNLGRAVFQAKKRVLEPLGLVEEPVKTAPGKKRPVEHSPVEPDSSSGTGKAGQQPARKRLNFGQTGDADSVPDPQPLGQPPAAPSGLGTNTMATGSGAPMADNNEGADGVGNSSGNWHCDSTWMGDRVITTSTRTWALPTYNNHLYKQISSQSGASNDNHYFGYSTPWGYFDFNRFHCHFSPRDWQRLINNNWGFRPKRLNFKLFNIQVKEVTQNDGTTTIANNLTSTVQVFTDSEYQLPYVLGSAHQGCLPPFPADVFMVPQYGYLTLNNGSQAVGRSSFYCLEYFPSQMLRTGNNFTFSYTFEDVPFHSSYAHSQSLDRLMNPLIDQYLYYLSRTNTPSGTTTQSRLQFSQAGASDIRDQSRNWLPGPCYRQQRVSKTSADNNNSEYSWTGATKYHLNGRDSLVNPGPAMASHKDDEEKFFPQSGVLIFGKQGSEKTNVDIEKVMITDEEEIRTTNPVATEQYGSVSTNLQRGQRGESGHGYFAQAATADVNTQGVLPGMVWQDRDVYLQGPIWAKIPHTDGHFHPSPLMGGFGLKHPPPQILIKNTPVPANPSTTFSAAKFASFITQYSTGQVSVEIEWELQKENSKRWNPEIQYTSNYNKSVNVDFTVDTNGVYSEPRPIGTRYLTRNL

SEQ ID NO: 1024 - DNA, 8359 bp, Artificial Sequence
  Synthetic polynucleotide
catcatcaataatataccttattttggattgaagccaatatgataatgagggggtggagtttgtgacgtggcgcggggcgtgggaacggggcgggtgacgtagtagctctagaggtcctgtattagaggtcacgtgagtgttttgcgacattttgcgacaccatgtggtcacgctgggtatttaagcccgagtgagcacgcagggtctccattttgaagcgggaggtttgaacgcgcagccgccatgccggggttttacgagattgtgattaaggtccccagcgaccttgacgagcatctgcccggcatttctgacagctttgtgaactgggtggccgagaaggaatgggagttgccgccagattctgacatggatctgaatctgattgagcaggcacccctgaccgtggccgagaagctgcagcgcgactttctgacggaatggcgccgtgtgagtaaggcaccggaggcccttttctttgtgcaatttgagaagggagagagctacttccacatgcacgtgctcgtggaaaccaccggggtgaaatccatggttttgggacgtttcctgagtcagattcgcgaaaaactgattcagagaatttaccgcgggatcgagccgactttgccaaactggttcgcggtcacaaagaccagaaatggcgccggaggcgggaacaaggtggtggatgagtgctacatccccaattacttgctccccaaaacccagcctgagctccagtgggcgtggactaatatggaacagtatttaagcgcctgtttgaatctcacggagcgtaaacggttggtggcgcagcatctgacgcacgtgtcgcagacgcaggagcagaacaaagagaatcagaatcccaattctgatgcgccggtgatcagatcaaaaacttcagccaggtacatggagctggtcgggtggctcgtggacaaggggattacctcggagaagcagtggatccaggaggaccaggcctcatacatctccttcaatgcggcctccaactcgcggtcccaaatcaaggctgccttggacaatgcgggaaagattatgagcctgactaaaaccgcccccgactacctggtgggccagcagcccgtggaggacatttccagcaatcggatttataaaattttggaactaaacgggtacgatccccaatatgcggcttccgtctttctgggatgggccacgaaaaagttcggcaagaggaacaccatctggctgtttgggcctgcaactaccgggaagaccaacatcgcggaggccatagcccacactgtgcccttctacgggtgcgtaaactggaccaatgagaactttcccttcaacgactgtgtcgacaagatggtgatctggtgggaggaggggaagatgaccgccaaggtcgtggagtcggccaaagccattctcggaggaagcaaggtgcgcgtggaccagaaatgcaagtcctcggcccagatagacccgactcccgtgatcgtcacctccaacaccaacatgtgcgccgtgattgacgggaactcaacgaccttcgaacaccagcagccgttgcaagaccggatgttcaaatttgaactcacccgccgtctggatcatgactttgggaaggtcaccaagcaggaagtcaaagactttttccggtgggcaaaggatcacgtggttgaggtggagcatgaattctacgtcaaaaagggtggagccaagaaaagacccgcccccagtgacgcagatataagtgagcccaaacgggtgcgcgagtcagttgcgcagccatcgacgtcagacgcggaagcttcgatcaactacgcagacaggtaccaaaacaaatgttctcgtcacgtgggcatgaatctgatgctgtttccctgcagacaatgcgagagaatgaatcagaattcaaatatctgcttcactcacggacagaaagactgtttagagtgctttcccgtgtcagaatctcaacccgtttctgtcgtcaaaaaggcgtatcagaaactgtgctacattcatcatatcatgggaaaggtgccagacgcttgcactgcctgcgatctggtcaatgtggatttggatgactgcatctttgaacaataaatgatttaaatcaggtatggctgccgatggttatcttccagattggctcgaggacactctctctgaaggaataagacagtggtggaagctcaaacctggcccaccaccaccaaagcccgcagagcggcataaggacgacagcaggggtcttgtgcttcctgggtacaagtacctcggacccttcaacggactcgacaagggagagccggtcaacgaggcagacgccgcggccctcgagcacgacaaagcctacgaccggcagctcgacagcggagacaacccgtacctcaagtacaaccacgccgacgcggagtttcaggagcgccttaaagaagatacgtcttttgggggcaacctcggacgagcagtcttccaggcgaaaaagagggttcttgaacctctgggcctggttgaggaacctgttaagacggctccgggaaaaaagaggccggtagagcactctcctgtggagccagactcctcctcgggaaccggaaaggcgggccagcagcctgcaagaaaaagattgaattttggtcagactggagacgcagactcagtacctgacccccagcctctcggacagccaccagcagccccctctggtctgggaactaatacgatggctacaggcagtggcgcaccaatggcagacaataacgagggcgccgacggagtgggtaattcctcgggaaattggcattgcgattccacatggatgggcgacagagtcatcaccaccagcacccgaacctgggccctgcccacctacaacaaccacctctacaaacaaatttccagccaatcaggagcctcgaacgacaatcactactttggctacagcaccccttgggggtattttgacttcaacagattccactgccacttttcaccacgtgactggcaaagactcatcaacaacaactggggattccgacccaagagactcaacttcaagctctttaacattcaagtcaaagaggtcacgcagaatgacggtacgacgacgattgccaataaccttaccagcacggttcaggtgtttactgactcggagtaccagctcccgtacgtcctcggctcggcgcatcaaggatgcctcccgccgttcccagcagacgtcttcatggtgccacagtatggatacctcaccctgaacaacgggagtcaggcagtaggacgctcttcattttactgcctggagtactttccttctcagatgctgcgtaccggaaacaactttaccttcagctacacttttgaggacgttcctttccacagcagctacgctcacagccagagtctggaccgtctcatgaatcctctcatcgaccagtacctgtattacttgagcagaacaaacactccaagtggaaccaccacgcagtcaaggcttcagttttctcaggccggagcgagtgacattcgggaccagtctaggaactggcttcctggaccctgttaccgccagcagcgagtatcaaagacatctgcggataacaacaacagtgaatactcgtggactggagctaccaagtaccacctcaatggcagagactctctggtgaatccgggcccggccatggcaagccacaaggacgatgaagaaaagttttttcctcagagcggggttctcatctttgggaagcaaggctcagagaaaacaaatgtggacattgaaaaggtcatgattacagacgaagaggaaatcaggacaaccaatcccgtggctacggagcagtatggttctgtatctaccaacctccagagaggccagagaggcgagtctggtcatggttattttgcccaggcggccaccgcagatgtcaacacacaaggcgttcttccaggcatggtctggcaggacagagatgtgtaccttcaggggcccatctgggcaaagattccacacacggacggacattttcacccctctcccctcatgggtggattcggacttaaacaccctcctccacagattctcatcaagaacaccccggtacctgcgaatccttcgaccaccttcagtgcggcaaagtttgcttccttcatcacacagtactccacgggacaggtcagcgtggagatcgagtgggagctgcagaaggaaaacagcaaacgctggaatcccgaaattcagtacacttccaactacaacaagtctgttaatgtggactttactgtggacactaatggcgtgtattcagagcctcgccccattggcaccagatacctgactcgtaatctgtaattgcttgttaatcaataaaccgtttaattcgtttcagttgaactttggtctctgcgtatttctttcttatctagtttccatgctctagaggtcctgtattagaggtcacgtgagtgttttgcgacattttgcgacaccatgtggtcacgctgggtatttaagcccgagtgagcacgcagggtctccattttgaagcgggaggtttgaacgcgcagccaccacggcggggttttacgagattgtgattaaggtccccagcgaccttgacgagcatctgcccggcatttctgacagctttgtgaactgggtggccgagaaggaatgggagttgccgccagattctgacatggatctgaatctgattgagcaggcacccctgaccgtggccgagaagctgcatcgctggcgtaatagcgaagaggcccgcaccgatcgcccttcccaacagttgcgcagcctgaatggcgaatggcgattccgttgcaatggctggcggtaatattgttctggatattaccagcaaggccgatagtttgagttcttctactcaggcaagtgatgttattactaatcaaagaagtattgcgacaacggttaatttgcgtgatggacagactcttttactcggtggcctcactgattataaaaacacttctcaggattctggcgtaccgttcctgtctaaaatccctttaatcggcctcctgtttagctcccgctctgattctaacgaggaaagcacgttatacgtgctcgtcaaagcaaccatagtacgcgccctgtagcggcgcattaagcgcggcgggtgtggtggttacgcgcagcgtgaccgctacacttgccagcgccctagcgcccgctcctttcgctttcttcccttcctttctcgccacgttcgccggctttccccgtcaagctctaaatcgggggctccctttagggttccgatttagtgctttacggcacctcgaccccaaaaaacttgattagggtgatggttcacgtagtgggccatcgccctgatagacggtttttcgccctttgacgttggagtccacgttctttaatagtggactcttgttccaaactggaacaacactcaaccctatctcggtctattcttttgatttataagggattttgccgatttcggcctattggttaaaaaatgagctgatttaacaaaaatttaacgcgaattttaacaaaatattaacgtttacaatttaaatatttgcttatacaatcttcctgtttttggggcttttctgattatcaaccggggtacatatgattgacatgctagttttacgattaccgttcatcgattctcttgtttgctccagactctcaggcaatgacctgatagcctttgtagagacctctcaaaaatagctaccctctccggcatgaatttatcagctagaacggttgaatatcatattgatggtgatttgactgtctccggcctttctcacccgtttgaatctttacctacacattactcaggcattgcatttaaaatatatgagggttctaaaaatttttatccttgcgttgaaataaaggcttctcccgcaaaagtattacagggtcataatgtttttggtacaaccgatttagctttatgctctgaggctttattgcttaattttgctaattctttgccttgcctgtatgatttattggatgttggaattcctgatgcggtattttctccttacgcatctgtgcggtatttcacaccgcatatggtgcactctcagtacaatctgctctgatgccgcatagttaagccagccccgacacccgccaacacccgctgacgcgccctgacgggcttgtctgctcccggcatccgcttacagacaagctgtgaccgtctccgggagctgcatgtgtcagaggttttcaccgtcatcaccgaaacgcgcgagacgaaagggcctcgtgatacgcctatttttataggttaatgtcatgataataatggtttcttagacgtcaggtggcacttttcggggaaatgtgcgcggaacccctatttgtttatttttctaaatacattcaaatatgtatccgctcatgagacaataaccctgataaatgcttcaataatattgaaaaaggaagagtatgagtattcaacatttccgtgtcgcccttattcccttttttgcggcattttgccttcctgtttttgctcacccagaaacgctggtgaaagtaaaagatgctgaagatcagttgggtgcacgagtgggttacatcgaactggatctcaacagcggtaagatccttgagagttttcgccccgaagaacgttttccaatgatgagcacttttaaagttctgctatgtggcgcggtattatcccgtattgacgccgggcaagagcaactcggtcgccgcatacactattctcagaatgacttggttgagtactcaccagtcacagaaaagcatcttacggatggcatgacagtaagagaattatgcagtgctgccataaccatgagtgataacactgcggccaacttacttctgacaacgatcggaggaccgaaggagctaaccgcttttttgcacaacatgggggatcatgtaactcgccttgatcgttgggaaccggagctgaatgaagccataccaaacgacgagcgtgacaccacgatgcctgtagcaatggcaacaacgttgcgcaaactattaactggcgaactacttactctagcttcccggcaacaattaatagactggatggaggcggataaagttgcaggaccacttctgcgctcggcccttccggctggctggtttattgctgataaatctggagccggtgagcgtgggtctcgcggtatcattgcagcactggggccagatggtaagccctcccgtatcgtagttatctacacgacggggagtcaggcaactatggatgaacgaaatagacagatcgctgagataggtgcctcactgattaagcattggtaactgtcagaccaagtttactcatatatactttagattgatttaaaacttcatttttaatttaaaaggatctaggtgaagatcctttttgataatctcatgaccaaaatcccttaacgtgagttttcgttccactgagcgtcagaccccgtagaaaagatcaaaggatcttcttgagatcctttttttctgcgcgtaatctgctgcttgcaaacaaaaaaaccaccgctaccagcggtggtttgtttgccggatcaagagctaccaactctttttccgaaggtaactggcttcagcagagcgcagataccaaatactgtccttctagtgtagccgtagttaggccaccacttcaagaactctgtagcaccgcctacatacctcgctctgctaatcctgttaccagtggctgctgccagtggcgataagtcgtgtcttaccgggttggactcaagacgatagttaccggataaggcgcagcggtcgggctgaacggggggttcgtgcacacagcccagcttggagcgaacgacctacaccgaactgagatacctacagcgtgagctatgagaaagcgccacgcttcccgaagggagaaaggcggacaggtatccggtaagcggcagggtcggaacaggagagcgcacgagggagcttccagggggaaacgcctggtatctttatagtcctgtcgggtttcgccacctctgacttgagcgtcgatttttgtgatgctcgtcaggggggcggagcctatggaaaaacgccagcaacgcggcctttttacggttcctggccttttgctggccttttgctcacatgttctttcctgcgttatcccctgattctgtggataaccgtattaccgcctttgagtgagctgataccgctcgccgcagccgaacgaccgagcgcagcgagtcagtgagcgaggaagcggaagagcgcccaatacgcaaaccgcctctccccgcgcgttggccgattcattaatgcagaattcc

SEQ ID NO: 1025 - protein, 736 aa, Artificial Sequence
  Synthetic polypeptide
MAADGYLPDWLEDNLSEGIREWWDLKPGAPKPKANQQKQDDGRGLVLPGYKYLGPFNGLDKGEPVNAADAAALEHDKAYDQQLKAGDNPYLRYNHADAEFQERLQEDTSFGGNLGRAVFQAKKRVLEPLGLVEEGAKTAPGKKRPVEQSPQEPDSSSGIGKKGQQPAKKRLNFGQTGDSESVPDPQPLGEPPAAPSGVGSNTMAAGGGAPMADNNEGADGVGNASGNWHCDSTWLGDRVITTSTRTWALPTYNNHLYKQISSQSGASTNDNTYFGYSTPWGYFDFNRFHCHFSPRDWQRLINNNWGFRPKRLNFKLFNIQVKEVTTNDGTTTIANNLTSTVQVFTDSEYQLPYVLGSAHQGCLPPFPADVFMIPQYGYLTLNNGSQAVGRSSFYCLEYFPSQMLRTGNNFEFSYTFEDVPFHSSYAHSQSLDRLMNPLIDQYLYYLSRTQTTSGTAGNRTLQFSQAGPSSMANQAKNWLPGPCYRQQRVSKTANQNNNSNFAWTGATKYHLNGRDSLVNPGPAMATHKDDEDKFFPMSGVLIFGKQGAGNSNVDLDNVMITSEEEIKTTNPVATEQYGTVATNLQSSNTAPATGTVNSQGALPGMVWQNRDVYLQGPIWAKIPHTDGHFHPSPLMGGFGLKHPPPQILIKNTPVPANPPTTFSPAKFASFITQYSTGQVSVEIEWELQKENSKRWNPEIQYTSNYNKSTNVDFAVDTNGVYSEPRPIGTRYLTRNL

SEQ ID NO: 1026 - DNA, 2208 bp, Artificial Sequence
  Synthetic polynucleotide
atggctgccgatggttatcttccagattggctcgaggacaacctctctgagggcattcgcgagtggtgggacttgaaacctggagccccgaaacccaaagccaaccagcaaaagcaggacgacggccggggtctggtgcttcctggctacaagtacctcggacccttcaacggactcgacaagggggagcccgtcaacgcggcggacgcagcggccctcgagcacgacaaggcctacgaccagcagctcaaagcgggtgacaatccgtacctgcggtataaccacgccgacgccgagtttcaggagcgtctgcaagaagatacgtcttttgggggcaacctcgggcgagcagtcttccaggccaagaagcgggttctcgaacctctcggtctggttgaggaaggcgctaagacggctcctggaaagaagagaccggtagagcaatcaccccaggaaccagactcctcttcgggcatcggcaagaaaggccagcagcccgcgaagaagagactcaactttgggcagacaggcgactcagagtcagtgcccgaccctcaaccactcggagaaccccccgcagccccctctggtgtgggatctaatacaatggcagcaggcggtggcgctccaatggcagacaataacgaaggcgccgacggagtgggtaacgcctcaggaaattggcattgcgattccacatggctgggcgacagagtcatcaccaccagcacccgaacctgggccctccccacctacaacaaccacctctacaagcaaatctccagccaatcgggagcaagcaccaacgacaacacctacttcggctacagcaccccctgggggtattttgactttaacagattccactgccacttctcaccacgtgactggcagcgactcatcaacaacaactggggattccggcccaagagactcaacttcaagctcttcaacatccaggtcaaggaggtcacgacgaatgatggcaccacgaccatcgccaataaccttaccagcacggttcaggtctttacggactcggaataccagctcccgtacgtcctcggctctgcgcaccagggctgcctgcctccgttcccggcggacgtcttcatgattcctcagtacgggtacctgactctgaacaatggcagtcaggccgtgggccgttcctccttctactgcctggagtactttccttctcaaatgctgagaacgggcaacaactttgagttcagctacacgtttgaggacgtgccttttcacagcagctacgcgcacagccaaagcctggaccggctgatgaaccccctcatcgaccagtacctgtactacctgtctcggactcagaccacgagtggtaccgcaggaaatcggacgttgcaattttctcaggccgggcctagtagcatggcgaatcaggccaaaaactggctacccgggccctgctaccggcagcaacgcgtctccaagacagcgaatcaaaataacaacagcaactttgcctggaccggtgccaccaagtatcatctgaatggcagagactctctggtaaatcccggtcccgctatggcaacccacaaggacgacgaagacaaattttttccgatgagcggagtcttaatatttgggaaacagggagctggaaatagcaacgtggaccttgacaacgttatgataaccagtgaggaagaaattaaaaccaccaacccagtggccacagaacagtacggcacggtggccactaacctgcaatcgtcaaacaccgctcctgctacagggaccgtcaacagtcaaggagccttacctggcatggtctggcagaaccgggacgtgtacctgcagggtcctatctgggccaagattcctcacacggacggacactttcatccctcgccgctgatgggaggctttggactgaaacacccgcctcctcagatcctgattaagaatacacctgttcccgcgaatcctccaactaccttcagtccagctaagtttgcgtcgttcatcacgcagtacagcaccggacaggtcagcgtggaaattgaatgggagctgcagaaagaaaacagcaaacgctggaacccagagattcaatacacttccaactacaacaaatctacaaatgtggactttgctgttgacacaaatggcgtttattctgagcctcgccccatcggcacccgttacctcacccgtaatctg

SEQ ID NO: 1027 - protein, 737 aa, Artificial Sequence
  Synthetic polypeptide
MAADGYLPDWLEDNLSEGIREWWDLKPGAPKPKANQQKQDDGRGLVLPGYKYLGPFNGLDKGEPVNAADAAALEHDKAYDQQLKAGDNPYLRYNHADAEFQERLQEDTSFGGNLGRAVFQAKKRVLEPLGLVEEGAKTAPGKKRPVEQSPQEPDSSTGIGKKGQQPAKKRLNFGQTGDSESVPDPQPLGEPPAAPSGVGSNTMAAGGGAPMADNNEGADGVGNASGNWHCDSTWLGDRVITTSTRTWALPTYNNHLYKQISNSQSGGSTNDNTYFGYSTPWGYFDFNRFHCHFSPRDWQRLINNNWGFRPKRLNFKLFNIQVKEVTTNDGTTTIANNLTSTVQVFTDSEYQLPYVLGSAHQGCLPPFPADVFMIPQYGYLTLNNGSQAVGRSSFYCLEYFPSQMLRTGNNFEFSYTFEDVPFHSSYAHSQSLDRLMNPLIDQYLYYLSRTQTTGGTAGNRTLQFSQAGPSSMANQAKNWLPGPCYRQQRVSKTTNQNNNSNFAWTGATKYHLNGRDSLVNPGVAMATHKDDEDRFFPSSGVLIFGKQGAGNDNVDLDNVMITSEEEIKTTNPVATEEYGVVATNLQSANTAPQTGTVNSQGALPGMVWQNRDVYLQGPIWAKIPHTDGNFHPSPLMGGFGLKHPPPQILIKNTPVPANPPTTFSPAKFASFITQYSTGQVSVEIEWELQKENSKRWNPEIQYTSNYNKSTNVDFAVDTEGVYSEPRPIGTRYLTRNL

SEQ ID NO: 1028 - DNA, 2211 bp, Artificial Sequence
  Synthetic polynucleotide
atggctgccgatggttatcttccagattggctcgaggacaacctctctgagggcattcgcgagtggtgggacttgaaacctggagccccgaaacccaaagccaaccagcaaaagcaggacgacggccggggtctggtgcttcctggctacaagtacctcggacccttcaacggactcgacaagggggagcccgtcaacgcggcggacgcagcggccctcgagcacgacaaggcctacgaccagcagctcaaagcgggtgacaatccgtacctgcggtataaccacgccgacgccgagtttcaggagcgtctgcaagaagatacgtcttttgggggcaacctcgggcgagcagtcttccaggccaagaagcgggttctcgaacctctcggtctggttgaggaaggcgctaagacggctcctggaaagaagagaccggtagagcaatcaccccaggaaccagactcctctacgggcatcggcaagaaaggccagcagcccgcgaaaaagagactcaactttgggcagactggcgactcagagtcagtgcccgaccctcaaccactcggagaaccccccgcagccccctctggtgtgggatctaatacaatggctgcaggcggtggcgctccaatggcagacaataacgaaggcgccgacggagtgggtaatgcctcaggaaattggcattgcgattccacatggctgggcgacagagtcatcaccaccagcacccgaacctgggccctccccacctacaacaaccacctctacaagcaaatctccaacagccaatcgggaggaagcaccaacgacaacacctacttcggctacagcaccccctgggggtattttgactttaacagattccactgccacttctcaccacgtgactggcagcgactcatcaacaacaactggggattccggcccaagagactcaacttcaagctcttcaacatccaggtcaaggaggtcacgacgaatgatggcaccacgaccatcgccaataaccttaccagcacggttcaggtctttacggactcggaataccagctcccgtacgtcctcggctctgcgcaccagggctgcctgcctccgttcccggcggacgtcttcatgattcctcagtacgggtacctgactctgaacaatggcagtcaggccgtgggccgttcctccttctactgcctggagtactttccttctcaaatgctgagaacgggcaacaactttgagttcagctacacgtttgaggacgtgccttttcacagcagctacgcgcacagccaaagcctggaccggctgatgaaccccctcatcgaccagtacctgtactacctgtctcggactcagaccacgggaggtaccgcaggaaatcggacgttgcaattttctcaggccgggcctagtagcatggcgaatcaggccaaaaactggctacccgggccctgctaccggcagcaacgcgtctccaagacaacgaatcaaaataacaacagcaactttgcctggaccggtgccaccaagtatcatctgaatggcagagactctctggtaaatcccggtgtcgctatggcaacccacaaggacgacgaagaccgattttttccgtccagcggagtcttaatatttgggaaacagggagctggaaatgacaacgtggaccttgacaacgttatgataaccagtgaggaagaaattaaaaccaccaacccagtggccacagaagagtacggcgtggtggccactaacctgcaatcggcaaacaccgctcctcaaacagggaccgtcaacagtcaaggagccttacctggcatggtctggcagaaccgggacgtgtacctgcagggtcctatctgggccaagattcctcacacggacggaaactttcatccctcgccgctgatgggaggctttggactgaaacacccgcctcctcagatcctgattaagaatacacctgttcccgcgaatcctccaactaccttcagtccagctaagtttgcgtcgttcatcacgcagtacagcaccggacaggtcagcgtggaaattgaatgggagctgcagaaagaaaacagcaaacgctggaacccagagattcaatacacttccaactacaacaaatctacaaatgtggactttgctgttgacacagaaggcgtttattctgagcctcgccccatcggcacccgttacctcacccgtaatctg

SEQ ID NO: 1029 - protein, 738 aa, Artificial Sequence
  Synthetic polypeptide
MAADGYLPDWLEDNLSEGIREWWDLKPGAPKPKANQQKQDDGRGLVLPGYKYLGPFNGLDKGEPVNAADAAALEHDKAYDQQLKAGDNPYLRYNHADAEFQERLQEDTSFGGNLGRAVFQAKKRVLEPLGLVEEGAKTAPGKKRPVEQSPQREPDSSTGIGKKGQQPAKKRLNFGQTGDSESVPDPQPLGEPPAAPSGVGSNTMAAGGGAPMADNNEGADGVGNSSGNWHCDSTWLGDRVITTSTRTWALPTYNNHLYKQISNGTSGGSTNDNTYFGYSTPWGYFDFNRFHCHFSPRDWQRLINNNWGFRPKRLNFKLFNIQVKEVTTNEGTKTIANNLTSTVQVFTDSEYQLPYVLGSAHQGCLPPFPADVFMIPQYGYLTLNNGSQAVGRSSFYCLEYFPSQMLRTGNNFQFSYTFEDVPFHSSYAHSQSLDRLMNPLIDQYLYYLSRTQTTGGTAGTQTLQFSQAGPSSMANQAKNWLPGPCYRQQRVSTTTNQNNNSNFAWTGATKYHLNGRDSLVNPGVAMATHKDDEDRFFPSSGVLIFGKQGAGNDNVDYSNVMITSEEEIKTTNPVATEEYGVVATNLQSANTAPQTGTVNSQGALPGMVWQNRDVYLQGPIWAKIPHTDGNFHPSPLMGGFGLKHPPPQILIKNTPVPADPPTTFNQAKLNSFITQYSTGQVSVEIEWELQKENSKRWNPEIQYTSNYYKSTNVDFAVNTEGVYSEPRPIGTRYLTRNL

SEQ ID NO: 1030 - DNA, 2214 bp, Artificial Sequence
  Synthetic polynucleotide
atggctgccgatggttatcttccagattggctcgaggacaacctctctgagggcattcgcgagtggtgggacctgaaacctggagccccgaaacccaaagccaaccagcaaaagcaggacgacggccggggtctggtgcttcctggctacaagtacctcggacccttcaacggactcgacaagggggagcccgtcaacgcggcggacgcagcggccctcgagcacgacaaggcctacgaccagcagctcaaagcgggtgacaatccgtacctgcggtataatcacgccgacgccgagtttcaggagcgtctgcaagaagatacgtcttttgggggcaacctcgggcgagcagtcttccaggccaagaagcgggttctcgaacctctcggtctggttgaggaaggcgctaagacggctcctggaaagaagagaccggtagagcagtcaccacagcgtgagcccgactcctccacgggcatcggcaagaaaggccagcagcccgccaaaaagagactcaatttcggtcagactggcgactcagagtcagtccccgaccctcaacctctcggagaacctccagcagcgccctctggtgtgggatctaatacaatggctgcaggcggtggcgcaccaatggcagacaataacgaaggtgccgacggagtgggtaattcctcgggaaattggcattgcgattccacatggctgggcgacagagtcatcaccaccagcacccgaacctgggccctgcccacctacaacaaccacctctacaagcaaatctccaacgggacctcgggaggcagcaccaacgacaacacctactttggctacagcaccccctgggggtattttgactttaacagattccactgccacttctcaccacgtgactggcagcgactcatcaacaacaactggggattccggcccaagagactcaacttcaagctcttcaacatccaggtcaaagaggtcacgacgaatgaaggcaccaagaccatcgccaataacctcaccagcaccgtccaggtgtttacggactcggaataccagctgccgtacgtcctcggctctgcccaccagggctgcctgcctccgttcccggcggacgtcttcatgattcctcagtacggctacctgactctcaacaacggtagtcaggccgtgggacgttcctccttctactgcctggagtacttcccctctcagatgctgagaacgggcaacaactttcaattcagctacactttcgaggacgtgcctttccacagcagctacgcgcacagccagagtttggacaggctgatgaatcctctcatcgaccagtacctgtactacctgtcaagaacccagactacgggaggcacagcgggaacccagacgttgcagttttctcaggccgggcctagcagcatggcgaatcaggccaaaaactggctgcctggaccctgctacagacagcagcgcgtctccacgacaacgaatcaaaacaacaacagcaactttgcctggactggtgccaccaagtatcatctgaacggcagagactctctggtgaatccgggcgtcgccatggcaacccacaaggacgacgaggaccgcttcttcccatccagcggcgtcctcatatttggcaagcagggagctggaaatgacaacgtggactatagcaacgtgatgataaccagcgaggaagaaatcaagaccaccaaccccgtggccacagaagagtatggcgtggtggctactaacctacagtcggcaaacaccgctcctcaaacggggaccgtcaacagccagggagccttacctggcatggtctggcagaaccgggacgtgtacctgcagggtcctatttgggccaagattcctcacacagatggcaactttcacccgtctcctttaatgggcggctttggacttaaacatccgcctcctcagatcctcatcaaaaacactcctgttcctgcggatcctccaacaacgttcaaccaggccaagctgaattctttcatcacgcagtacagcaccggacaagtcagcgtggagatcgagtgggagctgcagaaggagaacagcaagcgctggaacccagagattcagtatacttccaactactacaaatctacaaatgtggactttgctgttaatactgagggtgtttactctgagcctcgccccattggcactcgttacctcacccgtaatctg

SEQ ID NO: 1031 - protein, 738 aa, Artificial Sequence
  Synthetic polypeptide
MAADGYLPDWLEDNLSEGIREWWDLKPGAPKPKANQQKQDDGRGLVLPGYKYLGPFNGLDKGEPVNAADAAALEHDKAYDQQLKAGDNPYLRYNHADAEFQERLQEDTSFGGNLGRAVFQAKKRVLEPLGLVEEGAKTAPGKKRPVEQSPQREPDSSTGIGKKGQQPARKRLNFGQTGDSESVPDPQPLGEPPAAPSGVGSNTMAAGGGAPMADNNEGADGVGSSSGNWHCDSTWLGDRVITTSTRTWALPTYNNHLYKQISNGTSGGSTNDNTYFGYSTPWGYFDFNRFHCHFSPRDWQRLINNNWGFRPKRLNFKLFNIQVKEVTQNEGTKTIANNLTSTIQVFTDSEYQLPYVLGSAHQGCLPPFPADVFMIPQYGYLTLNNGSQAVGRSSFYCLEYFPSQMLRTGNNFQFSYTFEDVPFHSSYAHSQSLDRLMNPLIDQYLYYLSRTQTTGGTAGTQTLQFSQAGPSNMANQAKNWLPGPCYRQQRVSTTTSQNNNSNFAWTGATKYHLNGRDSLVNPGVAMATHKDDEDRFFPSSGILIFGKQGAGKDNVDYSNVMLTSEEEIKTTNPVATEEYGVVADNLQQQNTAPQIGTVNSQGALPGMVWQNRDVYLQGPIWAKIPHTDGNFHPSPLMGGFGLKHPPPQILIKNTPVPADPPTTFNQAKLNSFITQYSTGQVSVEIEWELQKENSKRWNPEIQYTSNYYKSTNVDFAVNTEGVYSEPRPIGTRYLTRNL

SEQ ID NO: 1032 - DNA, 2214 bp, Artificial Sequence
  Synthetic polynucleotide
atggctgccgatggttatcttccagattggctcgaggacaacctctctgagggcattcgcgagtggtgggacctgaaacctggagccccgaaacccaaagccaaccagcaaaagcaggacgacggccggggtctggtgcttcctggctacaagtacctcggacccttcaacggactcgacaagggggagcccgtcaacgcggcggacgcagcggccctcgagcacgacaaggcctacgaccagcagctcaaagcgggtgacaatccgtacctgcggtataatcacgccgacgccgagtttcaggagcgtctgcaagaagatacgtcttttgggggcaacctcgggcgagcagtcttccaggccaagaagcgggttctcgaacctctcggtctggttgaggaaggcgctaagacggctcctggaaagaagagaccggtagagcagtcaccacagcgtgagcccgactcctccacgggcatcggcaagaaaggccagcagcccgccagaaagagactcaatttcggtcagactggcgactcagagtcagtccccgaccctcaacctctcggagaacctccagcagcgccctctggtgtgggatctaatacaatggctgcaggcggtggcgcaccaatggcagacaataacgaaggtgccgacggagtgggtagttcctcgggaaattggcattgcgattccacatggctgggcgacagagtcatcaccaccagcacccgaacctgggccctgcccacctacaacaaccacctctacaagcaaatctccaacgggacctcgggaggcagcaccaacgacaacacctactttggctacagcaccccctgggggtattttgactttaacagattccactgccacttctcaccacgtgactggcagcgactcatcaacaacaactggggattccggcccaagagactcaacttcaagctcttcaacatccaggtcaaagaggtcacgcagaatgaaggcaccaagaccatcgccaataacctcaccagcaccatccaggtgtttacggactcggaataccagctgccgtacgtcctcggctctgcccaccagggctgcctgcctccgttcccggcggacgtcttcatgattcctcagtacggctacctgactctcaacaacggtagtcaggccgtgggacgttcctccttctactgcctggagtacttcccctctcagatgctgagaacgggcaacaactttcaattcagctacactttcgaggacgtgcctttccacagcagctacgcgcacagccagagtttggacaggctgatgaatcctctcatcgaccagtacctgtactacctgtcaagaacccagactacgggaggcacagcgggaacccagacgttgcagttttctcaggccgggcctagcaacatggcgaatcaggccaaaaactggctgcctggaccctgctacagacagcagcgcgtctccacgacaacgtcgcaaaacaacaacagcaactttgcctggactggtgccaccaagtatcatctgaacggcagagactctctggtgaatccgggcgtcgccatggcaacccacaaggacgacgaggaccgcttcttcccatccagcggcatcctcatatttggcaagcagggagctggaaaagacaacgtggactatagcaacgtgatgctaaccagcgaggaagaaatcaagaccaccaaccccgtggccacagaagagtatggcgtggtggctgataacctacagcagcaaaacaccgctcctcaaatagggaccgtcaacagccagggagccttacctggcatggtctggcagaaccgggacgtgtacctgcagggtcctatttgggccaagattcctcacacagatggcaactttcacccgtctcctttaatgggcggctttggacttaaacatccgcctcctcagatcctcatcaaaaacactcctgttcctgcggatcctccaacaacgttcaaccaggccaagctgaattctttcatcacgcagtacagcaccggacaagtcagcgtggagatcgagtgggagctgcagaaggagaacagcaagcgctggaacccagagattcagtatacttccaactactacaaatctacaaatgtggactttgctgttaatactgagggtgtttactctgagcctcgccccattggcactcgttacctcacccgtaatctg

SEQ ID NO: 1033 - protein, 738 aa, Artificial Sequence
  Synthetic polypeptide
MAADGYLPDWLEDNLSEGIREWWDLKPGAPKPKANQQKQDDGRGLVLPGYKYLGPFNGLDKGEPVNAADAAALEHDKAYDQQLKAGDNPYLRYNHADAEFQERLQEDTSFGGNLGRAVFQAKKRVLEPLGLVEEGAKTAPGKKRPVEPSPQRSPDSSTGIGKKGQQPARKRLNFGQTGDSESVPDPQPIGEPPAAPSGVGSGTMAAGGGAPMADNNEGADGVGSSSGNWHCDSTWLGDRVITTSTRTWALPTYNNHLYKQISNGTSGGSTNDNTYFGYSTPWGYFDFNRFHCHFSPRDWQRLINNNWGFRPKRLNFKLFNIQVKEVTQNEGTKTIANNLTSTIQVFTDSEYQLPYVLGSAHQGCLPPFPADVFMIPQYGYLTLNNGSQAVGRSSFYCLEYFPSQMLRTGNNFEFSYTFEDVPFHSSYAHSQSLDRLMNPLIDQYLYYLSRTQSTGGTAGTQQLLFSQAGPSNMSAQAKNWLPGPCYRQQRVSTTLSQNNNSNFAWTGATKYHLNGRDSLVNPGVAMATHKDDEDRFFPSSGILMFGKQGAGKDNVDYSNVMLTSEEEIKTTNPVATEQYGVVADNLQQQNTAPIVGAVNSQGALPGMVWQNRDVYLQGPIWAKIPHTDGNFHPSPLMGGFGLKHPPPQILIKNTPVPADPPTTFNQAKLNSFITQYSTGQVSVEIEWELQKENSKRWNPEIQYTSNYYKSTNVDFAVNTEGVYSEPRPIGTRYLTRNL

SEQ ID NO: 1034 - DNA, 2214 bp, Artificial Sequence
  Synthetic polynucleotide
atggctgccgatggttatcttccagattggctcgaggacaacctctctgagggcattcgcgagtggtgggacctgaaacctggagccccgaaacccaaagccaaccagcaaaagcaggacgacggccggggtctggtgcttcctggctacaagtacctcggacccttcaacggactcgacaagggggagcccgtcaacgcggcggacgcagcggccctcgagcacgacaaggcctacgaccagcagctcaaagcgggtgacaatccgtacctgcggtataatcacgccgacgccgagtttcaggagcgtctgcaagaagatacgtcttttgggggcaacctcgggcgagcagtcttccaggccaagaagcgggttctcgaacctctcggtctggttgaggaaggcgctaagacggctcctggaaagaagagaccggtagagccgtcaccacagcgttcccccgactcctccacgggcatcggcaagaaaggccagcagcccgccagaaagagactcaatttcggtcagactggcgactcagagtcagtccccgaccctcaacctatcggagaacctccagcagcgccctctggtgtgggatctggtacaatggctgcaggcggtggcgcaccaatggcagacaataacgaaggtgccgacggagtgggtagttcctcgggaaattggcattgcgattccacatggctgggcgacagagtcatcaccaccagcacccgaacctgggccctgcccacctacaacaaccacctctacaagcaaatctccaacgggacctcgggaggcagcaccaacgacaacacctactttggctacagcaccccctgggggtattttgactttaacagattccactgccacttctcaccacgtgactggcagcgactcatcaacaacaactggggattccggcccaagagactcaacttcaagctcttcaacatccaggtcaaagaggtcacgcagaatgaaggcaccaagaccatcgccaataacctcaccagcaccatccaggtgtttacggactcggaataccagctgccgtacgtcctcggctctgcccaccagggctgcctgcctccgttcccggcggacgtcttcatgattcctcagtacggctacctgactctcaacaacggtagtcaggccgtgggacgttcctccttctactgcctggagtacttcccctctcagatgctgagaacgggcaacaactttgagttcagctacactttcgaggacgtgcctttccacagcagctacgcgcacagccagagtttggacaggctgatgaatcctctcatcgaccagtacctgtactacctgtcaagaacccagtctacgggaggcacagcgggaacccagcagttgctgttttctcaggccgggcctagcaacatgtcggctcaggccaaaaactggctgcctggaccctgctacagacagcagcgcgtctccacgacactgtcgcaaaacaacaacagcaactttgcctggactggtgccaccaagtatcatctgaacggcagagactctctggtgaatccgggcgtcgccatggcaacccacaaggacgacgaggaccgcttcttcccatccagcggcatcctcatgtttggcaagcagggagctggaaaagacaacgtggactatagcaacgtgatgctaaccagcgaggaagaaatcaagaccaccaaccccgtggccacagaacagtatggcgtggtggctgataacctacagcagcaaaacaccgctcctattgtgggggccgtcaacagccagggagccttacctggcatggtctggcagaaccgggacgtgtacctgcagggtcctatttgggccaagattcctcacacagatggcaactttcacccgtctcctttaatgggcggctttggacttaaacatccgcctcctcagatcctcatcaaaaacactcctgttcctgcggatcctccaacaacgttcaaccaggccaagctgaattctttcatcacgcagtacagcaccggacaagtcagcgtggagatcgagtgggagctgcagaaggagaacagcaagcgctggaacccagagattcagtatacttccaactactacaaatctacaaatgtggactttgctgttaatactgagggtgtttactctgagcctcgccccattggcactcgttacctcacccgtaatctg

SEQ ID NO: 1035 - protein, 738 aa, Artificial Sequence
  Synthetic polypeptide
MAADGYLPDWLEDNLSEGIREWWDLKPGAPKPKANQQKQDDGRGLVLPGYKYLGPFNGLDKGEPVNAADAAALEHDKAYDQQLKAGDNPYLRYNHADAEFQERLQEDTSFGGNLGRAVFQAKKRVLEPLGLVEEGAKTAPGKKRPVEPSPQRSPDSSTGIGKKGQQPAKKRLNFGQTGDSESVPDPQPIGEPPAGPSGLGSGTMAAGGGAPMADNNEGADGVGSSSGNWHCDSTWLGDRVITTSTRTWALPTYNNHLYKQISNGTSGGSTNDNTYFGYSTPWGYFDFNRFHCHFSPRDWQRLINNNWGFRPKRLNFKLFNIQVKEVTQNEGTKTIANNLTSTIQVFTDSEYQLPYVLGSAHQGCLPPFPADVFMIPQYGYLTLNNGSQAVGRSSFYCLEYFPSQMLRTGNNFEFSYTFEDVPFHSSYAHSQSLDRLMNPLIDQYLYYLSRTQSTGGTAGTQQLLFSQAGPSNMSAQAKNWLPGPCYRQQRVSTTLSQNNNSNFAWTGATKYHLNGRDSLVNPGVAMATHKDDEERFFPSSGVLMFGKQGAGKDNVDYSSVMLTSEEEIKTTNPVATEQYGVVADNLQQQNTAPIVGAVNSQGALPGMVWQNRDVYLQGPIWAKIPHTDGNFHPSPLMGGFGLKHPPPQILIKNTPVPADPPTTFSQAKLASFITQYSTGQVSVEIEWELQKENSKRWNPEIQYTSNYYKSTNVDFAVNTEGTYSEPRPIGTRYLTRNL

SEQ ID NO: 1036 - DNA, 2214 bp, Artificial Sequence
  Synthetic polynucleotide
atggctgccgatggttatcttccagattggctcgaggacaacctctctgagggcattcgcgagtggtgggacttgaaacctggagccccgaaacccaaagccaaccagcaaaagcaggacgacggccggggtctggtgcttcctggctacaagtacctcggacccttcaacggactcgacaagggggagcccgtcaacgcggcggacgcagcggccctcgagcacgacaaggcctacgaccagcagctcaaagcgggtgacaatccgtacctgcggtataaccacgccgacgccgagtttcaggagcgtctgcaagaagatacgtcttttgggggcaacctcgggcgagcagtcttccaggccaagaagcgggttctcgaacctctcggtctggttgaggaaggcgctaagacggctcctggaaagaagagaccggtagagccatcaccccagcgttctccagactcctctacgggcatcggcaagaaaggccagcagcccgcgaaaaagagactcaactttgggcagactggcgactcagagtcagtgcccgaccctcaaccaatcggagaaccccccgcaggcccctctggtctgggatctggtacaatggctgcaggcggtggcgctccaatggcagacaataacgaaggcgccgacggagtgggtagttcctcaggaaattggcattgcgattccacatggctgggcgacagagtcatcaccaccagcacccgaacctgggccctccccacctacaacaaccacctctacaagcaaatctccaacgggacttcgggaggaagcaccaacgacaacacctacttcggctacagcaccccctgggggtattttgactttaacagattccactgccacttctcaccacgtgactggcagcgactcatcaacaacaactggggattccggcccaagagactcaacttcaagctcttcaacatccaggtcaaggaggtcacgcagaatgaaggcaccaagaccatcgccaataaccttaccagcacgattcaggtctttacggactcggaataccagctcccgtacgtcctcggctctgcgcaccagggctgcctgcctccgttcccggcggacgtcttcatgattcctcagtacgggtacctgactctgaacaatggcagtcaggccgtgggccgttcctccttctactgcctggagtactttccttctcaaatgctgagaacgggcaacaactttgagttcagctacacgtttgaggacgtgccttttcacagcagctacgcgcacagccaaagcctggaccggctgatgaaccccctcatcgaccagtacctgtactacctgtctcggactcagtccacgggaggtaccgcaggaactcagcagttgctattttctcaggccgggcctagtaacatgtcggctcaggccaaaaactggctacccgggccctgctaccggcagcaacgcgtctccacgacactgtcgcaaaataacaacagcaactttgcctggaccggtgccaccaagtatcatctgaatggcagagactctctggtaaatcccggtgtcgctatggcaacccacaaggacgacgaagagcgattttttccgtccagcggagtcttaatgtttgggaaacagggagctggaaaagacaacgtggactatagcagcgttatgctaaccagtgaggaagaaattaaaaccaccaacccagtggccacagaacagtacggcgtggtggccgataacctgcaacagcaaaacaccgctcctattgtaggggccgtcaacagtcaaggagccttacctggcatggtctggcagaaccgggacgtgtacctgcagggtcctatctgggccaagattcctcacacggacggaaactttcatccctcgccgctgatgggaggctttggactgaaacacccgcctcctcagatcctgattaagaatacacctgttcccgcggatcctccaactaccttcagtcaagctaagctggcgtcgttcatcacgcagtacagcaccggacaggtcagcgtggaaattgaatgggagctgcagaaagaaaacagcaaacgctggaacccagagattcaatacacttccaactactacaaatctacaaatgtggactttgctgttaacacagaaggcacttattctgagcctcgccccatcggcacccgttacctcacccgtaatctg

SEQ ID NO: 1037 - protein, 737 aa, Artificial Sequence
  Synthetic polypeptide
MAADGYLPDWLEDNLSEGIREWWDLKPGAPKPKANQQKQDDGRGLVLPGYKYLGPFNGLDKGEPVNAADAAALEHDKAYDQQLKAGDNPYLRYNHADAEFQERLQEDTSFGGNLGRAVFQAKKRVLEPLGLVEEGAKTAPGKKRPVEPSPQRSPDSSTGIGKKGQQPAKKRLNFGQTGDSESVPDPQPLGEPPAAPSGVGSGTMAAGGGAPMADNNEGADGVGNASGNWHCDSTWLGDRVITTSTRTWALPTYNNHLYKQISSQSAGSTNDNTYFGYSTPWGYFDFNRFHCHFSPRDWQRLINNNWGFRPKKLRFKLFNIQVKEVTTNDGVTTIANNLTSTVQVFSDSEYQLPYVLGSAHQGCLPPFPADVFMIPQYGYLTLNNGSQSVGRSSFYCLEYFPSQMLRTGNNFEFSYTFEDVPFHSSYAHSQSLDRLMNPLIDQYLYYLARTQSTTGGTAGNRELQFYQAGPSTMAEQAKNWLPGPCYRQQRVSKTLDQNNNSNFAWTGATKYHLNGRNSLVNPGVAMATHKDDEDRFFPSSGVLIFGKTGAANKTTLENVLMTNEEEIKTTNPVATEEYGVVSSNLQSANTAPQTQTVNSQGALPGMVWQNRDVYLQGPIWAKIPHTDGNFHPSPLMGGFGLKHPPPQILIKNTPVPANPPEVFTPAKFASFITQYSTGQVSVEIEWELQKENSKRWNPEIQYTSNYDKSTNVDFAVDSEGVYSEPRPIGTRYLTRNL

SEQ ID NO: 1038 - DNA, 2211 bp, Artificial Sequence
  Synthetic polynucleotide
atggctgccgatggttatcttccagattggctcgaggacaacctctctgagggcattcgcgagtggtgggacctgaaacctggagccccgaaacccaaagccaaccagcaaaagcaggacgacggccggggtctggtgcttcctggctacaagtacctcggacccttcaacggactcgacaagggggagcccgtcaacgcggcggacgcagcggccctcgagcacgacaaggcctacgaccagcagctcaaagcgggtgacaatccgtacctgcggtataaccacgccgacgccgagtttcaggagcgtctgcaagaagatacgtcatttgggggcaacctcgggcgagcagtcttccaggccaagaagcgggttctcgaacctctcggtctggttgaggaaggcgctaagacggctcctggaaagaagagaccggtagagccgtcacctcagcgttcccccgactcctccacgggcatcggcaagaaaggccagcagcccgccaaaaagagactcaatttcggtcagactggcgactcagagtcagtccccgaccctcaacctctcggagaacctccagcagcgccctctggtgtgggatctggtacaatggctgcaggcggtggcgcaccaatggcagacaataacgaaggtgccgacggagtgggtaatgcctcaggaaattggcattgcgattccacatggctgggcgacagagtcattaccaccagcacccgaacctgggccctgcccacctacaacaaccacctctacaagcaaatctccagtcaaagtgcaggtagtaccaacgacaacacctacttcggctacagcaccccctgggggtattttgactttaacagattccactgccacttctcaccacgtgactggcagcgactcatcaacaacaactggggattccggcccaagaagctgcggttcaagctcttcaacatccaggtcaaggaggtcacgacgaatgacggcgttacgaccatcgctaataaccttaccagcacggttcaggtattctcggactcggaataccagctgccgtacgtcctcggctctgcgcaccagggctgcctgcctccgttcccggcggacgtcttcatgattcctcagtacggctacctgactctcaacaatggcagtcagtctgtgggacgttcctccttctactgcctggagtacttcccctctcagatgctgagaacgggcaacaactttgagttcagctacaccttcgaggacgtgcctttccacagcagctacgcacacagccagagcctggaccggctgatgaatcccctcatcgaccagtacttgtactacctggccagaacacagagtaccacaggaggcacagctggcaatcgggaactgcagttttaccaggccgggccttcaactatggccgaacaagccaagaattggttacctggaccttgctaccggcaacaaagagtctccaaaacgctggatcaaaacaacaacagcaactttgcttggactggtgccaccaaatatcacctgaacggcagaaactcgttggttaatcccggcgtcgccatggcaactcacaaggacgacgaggaccgctttttcccatccagcggagtcctgatttttggaaaaactggagcagctaacaaaactacattggaaaatgtgttaatgacaaatgaagaagaaattaaaactactaatcctgtagccacggaagaatacggggtagtcagcagcaacttacaatcggctaatactgcaccccagacacaaactgtcaacagccagggagccttacctggcatggtctggcagaaccgggacgtgtacctgcagggtcccatctgggccaagattcctcacacggatggcaactttcacccgtctcctttgatgggcggctttggacttaaacatccgcctcctcagatcctgatcaagaacactcccgttcccgctaatcctccggaggtgtttactcctgccaagtttgcttcgttcatcacacagtacagcaccggacaagtcagcgtggaaatcgagtgggagctgcagaaggaaaacagcaagcgctggaacccggagattcagtacacctccaactatgataagtcgactaatgtggactttgccgttgacagcgagggtgtttactctgagcctcgccctattggcactcgttacctcacccgtaatctg

SEQ ID NO: 1039 - protein, 735 aa, Artificial Sequence
  Synthetic polypeptide
MAADGYLPDWLEDNLSEGIREWWDLKPGAPKPKANQQKQDDGRGLVLPGYKYLGPFNGLDKGEPVNAADAAALEHDKAYDQQLKAGDNPYLRYNHADAEFQERLQEDTSFGGNLGRAVFQAKKRVLEPLGLVEEGAKTAPGKKRPVEQSPQEPDSSSGIGKSGQQPAKKRLNFGQTGDSESVPDPQPLGEPPAAPSGVGSNTMASGGGAPMADNNEGADGVGNASGNWHCDSTWLGDRVITTSTRTWALPTYNNHLYKQISSQSGASNDNHYFGYSTPWGYFDFNRFHCHFSPRDWQRLINNNWGFRPKRLNFKLFNIQVKEVTTNDGTTTIANNLTSTVQVFTDSEYQLPYVLGSAHQGCLPPFPADVFMIPQYGYLTLNNGSQAVGRSSFYCLEYFPSQMLRTGNNFTFSYTFEDVPFHSSYAHSQSLDRLMNPLIDQYLYYLSRTQTTSGTAQNRELQFSQAGPSSMANQAKNWLPGPCYRQQRVSKTANDNNNSNFAWTGATKYHLNGRDSLVNPGPAMASHKDDEDKFFPMSGVLIFGKQGAGASNVDLDNVMITDEEEIKTTNPVATEQYGTVATNLQSSNTAPATGTVNSQGALPGMVWQDRDVYLQGPIWAKIPHTDGHFHPSPLMGGFGLKHPPPQILIKNTPVPANPPTTFSPAKFASFITQYSTGQVSVEIEWELQKENSKRWNPEIQYTSNYNKSANVDFTVDTNGVYSEPRPIGTRYLTRNL

SEQ ID NO: 1040 - DNA, 2205 bp, Artificial Sequence
  Synthetic polynucleotide
atggctgccgatggttatcttccagattggctcgaggacaacctctctgagggcattcgcgagtggtgggacttgaaacctggagccccgaaacccaaagccaaccagcaaaagcaggacgacggccggggtctggtgcttcctggctacaagtacctcggacccttcaacggactcgacaagggggagcccgtcaacgcggcggatgcagcggccctcgagcacgacaaggcctacgaccagcagctcaaagcgggtgacaatccgtacctgcggtataaccacgccgacgccgagtttcaggagcgtctgcaagaagatacgtcttttgggggcaacctcgggcgagcagtcttccaggccaagaagagggttctcgaacctcttggtctggttgaggaaggtgctaagacggctcctggaaagaaacgtccggtagagcagtcgccacaagagccagactcctcctcgggcattggcaagtcaggccagcagcccgctaaaaagagactcaattttggtcagactggcgactcagagtcagtccccgacccacaacctctcggagaacctccagcagccccctctggtgtgggatctaatacaatggcttcaggcggtggcgcaccaatggcagacaataacgaaggcgccgacggagtgggtaatgcctcaggaaattggcattgcgattccacatggctgggcgacagagtcatcaccaccagcacccgaacatgggccttgcccacctataacaaccacctctacaagcaaatctccagtcaatcaggggccagcaacgacaaccactacttcggctacagcaccccctgggggtattttgatttcaacagattccactgccatttctcaccacgtgactggcagcgactcatcaacaacaattggggattccggcccaagagactcaacttcaagctcttcaacatccaagtcaaggaggtcacgacgaatgatggcaccacgaccatcgctaataaccttaccagcacggttcaagtcttcacggactcggagtaccagttgccgtacgtcctcggctctgcgcaccagggctgcctccctccgttcccggcggacgtgttcatgattccgcagtacggctacctaacgctcaacaatggcagccaggcagtgggacggtcatccttttactgcctggaatatttcccatcgcagatgctgagaacgggcaataactttaccttcagctacaccttcgaggacgtgcctttccacagcagctacgcgcacagccagagcctggaccggctgatgaatcctctcatcgaccagtacctgtattacctgagcagaactcagactacgtccggaactgcccaaaacagggagttgcagtttagccaggcgggtccatctagcatggctaatcaggccaaaaactggctacctggaccctgttaccggcagcagcgcgtttctaaaacagcaaatgacaacaacaacagcaactttgcctggactggtgctacaaaatatcaccttaatgggcgtgattctttagtcaaccctggccctgctatggcctcacacaaagacgacgaagacaagttctttcccatgagcggtgtcttgatttttggaaagcagggcgccggagcttcaaacgttgatttggacaatgtcatgatcacagacgaagaggaaatcaaaaccactaaccccgtggccaccgaacaatatgggactgtggcaaccaatctccagagcagcaacacagcccctgcgaccggaactgtgaattctcagggagccttacctggaatggtgtggcaagacagagacgtatacctgcagggtcctatttgggccaaaattcctcacacggatggacactttcacccgtctcctctcatgggcggctttggacttaagcacccgcctcctcagatcctcatcaaaaacacgcctgttcctgcgaatcctccgacaacgttttcgcctgcaaagtttgcttcattcatcacccagtattccacaggacaagtgagcgtggagattgaatgggagctgcagaaagaaaacagcaaacgctggaatcccgaaatacagtatacatctaactataataaatctgccaacgttgatttcactgtggacaccaatggagtttatagtgagcctcgccccattggcacccgttacctcacccgtaacctg

SEQ ID NO: 1041 - protein, 735 aa, Artificial Sequence
  Synthetic polypeptide
MAADGYLPDWLEDNLSEGIREWWDLKPGAPQPKANQQHQDDGRGLVLPGYKYLGPFNGLDKGEPVNEADAAALEHDKAYDQQLKAGDNPYLKYNHADAEFQERLQEDTSFGGNLGRAVFQAKKRVLEPLGLVEEAAKTAPGKKRPVEQSPQEPDSSSGIGKSGQQPARKRLNFGQTGDSESVPDPQPLGEPPAAPSGVGSNTMASGGGAPMADNNEGADGVGNSSGNWHCDSTWLGDRVITTSTRTWALPTYNNHLYKQISSQSGASNDNHYFGYSTPWGYFDFNRFHCHFSPRDWQRLINNNWGFRPKKLNFKLFNIQVKEVTQNDGTTTIANNLTSTVQVFTDSEYQLPYVLGSAHQGCLPPFPADVFMIPQYGYLTLNNGSQAVGRSSFYCLEYFPSQMLRTGNNFTFSYTFEDVPFHSSYAHSQSLDRLMNPLIDQYLYYLSRTQTTSGTTQQSRLQFSQAGPSSMAQQAKNWLPGPCYRQQRVSKTANDNNNSNFAWTGATKYHLNGRDSLVNPGPAMASHKDDEEKFFPMHGVLIFGKQGTGASNVDLDNVMITDEEEIRTTNPVATEQYGTVATNLQSSNTAPATGTVNSQGALPGMVWQDRDVYLQGPIWAKIPHTDGHFHPSPLMGGFGLKHPPPQILIKNTPVPANPPTTFSPAKFASFITQYSTGQVSVEIEWELQKENSKRWNPEIQYTSNYNKSVNVDFTVDTNGVYSEPRPIGTRYLTRNL

SEQ ID NO: 1042 - DNA, 2205 bp, Artificial Sequence
  Synthetic polynucleotide
atggctgctgacggttatcttccagattggctcgaggacaacctttctgaaggcattcgtgagtggtgggatctgaaacctggagcccctcaacccaaagcgaaccaacaacaccaggacgacggtcggggtcttgtgcttccgggttacaaatacctcggaccctttaacggactcgacaaaggagagccggtcaacgaggcggacgcggcagccctcgaacacgacaaagcttacgaccagcagctcaaggccggtgacaacccgtacctcaagtacaaccacgccgacgccgagtttcaggagcgtcttcaagaagatacgtcttttgggggcaaccttggcagagcagtcttccaggccaaaaagagggtccttgagcctcttggtctggttgaggaagcagctaaaacggctcctggaaagaagaggcctgtagaacagtctcctcaggaaccggactcatcatctggtattggcaaatcgggccaacagcctgccagaaaaagactaaatttcggtcagactggagactcagagtcagtcccagaccctcaacctctcggagaaccaccagcagccccctcaggtgtgggatctaatacaatggcttcaggcggtggcgcaccaatggcagacaataacgagggtgccgatggagtgggtaattcctcaggaaattggcattgcgattccacatggctgggcgacagagtcatcaccaccagcaccagaacctgggccctgcccacttacaacaaccatctctacaagcaaatctccagccaatcaggagcttcaaacgacaaccactactttggctacagcaccccttgggggtattttgactttaacagattccactgccacttctcaccacgtgactggcagcgactcattaacaacaactggggattccggcccaagaaactcaacttcaagctcttcaacatccaagttaaagaggtcacgcagaacgatggcacgacgactattgccaataaccttaccagcacggttcaagtgtttacggactcggagtatcagctcccgtacgtgctcgggtcggcgcaccaaggctgtctcccgccgtttccagcggacgtcttcatgatccctcagtatggatacctcaccctgaacaacggaagtcaagcggtgggacgctcatccttttactgcctggagtacttcccttcgcagatgctaaggactggaaataacttcacattcagctataccttcgaggatgtaccttttcacagcagctacgctcacagccagagtttggatcgcttgatgaatcctcttattgatcagtatctgtactacctgagcagaacgcaaacaacctctggaacaacccaacaatcacggctgcaatttagccaggctgggccttcgtctatggctcagcaggccaaaaattggctacctgggccctgctaccggcaacagagagtttcaaagactgctaacgacaacaacaacagtaactttgcttggacaggggccaccaaatatcatctcaatggccgcgactcgctggtgaatccaggaccagctatggccagtcacaaggacgatgaagaaaaatttttccctatgcacggcgttctaatatttggcaaacaagggacaggggcaagtaacgtagatttagataatgtaatgattacggatgaagaagagattcgtaccaccaatcctgtggcaacagagcagtatggaactgtggcaactaacttgcagagctcaaatacagctcccgcgactggaactgtcaatagtcagggggccttacctggcatggtgtggcaagatcgtgacgtgtaccttcaaggacctatctgggcaaagattcctcacacggatggacactttcatccttctcctctgatgggaggctttggactgaaacatccgcctcctcaaatcttgatcaaaaatactccggtaccggcaaatcctccgacgactttcagcccggccaagtttgcttcatttatcactcagtactccactggacaggtcagcgtggaaattgagtgggagctacagaaagaaaacagcaaacgttggaatccagagattcagtacacttccaactacaacaagtctgttaatgtggactttactgtagacactaatggtgtttatagtgaacctcgccctattggaacccggtatctcacacgaaacttg

SEQ ID NO: 1043 - protein, 736 aa, Artificial Sequence
  Synthetic polypeptide
MAADGYLPDWLEDNLSEGIREWWDLKPGAPKPKANQQKQDDGRGLVLPGYKYLGPFNGLDKGEPVNAADAAALEHDKAYDQQLKAGDNPYLRYNHADAEFQERLQEDTSFGGNLGRAVFQAKKRVLEPLGLVEEGAKTAPGKKRPVEQSPQEPDSSSGIGKKGQQPARKRLNFGQTGDSESVPDPQPLGEPPAAPSGVGSNTMAAGGGAPMADNNEGADGVGNASGNWHCDSTWLGDRVITTSTRTWALPTYNNHLYKQISSQSGGSTNDNTYFGYSTPWGYFDFNRFHCHFSPRDWQRLINNNWGFRPKRLNFKLFNIQVKEVTTNDGTTTIANNLTSTVQVFTDSEYQLPYVLGSAHQGCLPPFPADVFMIPQYGYLTLNNGSQAVGRSSFYCLEYFPSQMLRTGNNFEFSYTFEDVPFHSSYAHSQSLDRLMNPLIDQYLYYLSRTQTTSGTAGNRTLQFSQAGPSSMANQAKNWLPGPCYRQQRVSKTANQNNNSNFAWTGATKYHLNGRDSLVNPGPAMATHKDDEDKFFPMSGVLIFGKQGAGNSNVDLDNVMITNEEEIKTTNPVATEQYGTVATNLQSANTAPATGTVNSQGALPGMVWQDRDVYLQGPIWAKIPHTDGHFHPSPLMGGFGLKHPPPQILIKNTPVPANPPTTFSPAKFASFITQYSTGQVSVEIEWELQKENSKRWNPEIQYTSNYNKSTNVDFAVDTNGVYSEPRPIGTRYLTRNL

SEQ ID NO: 1044 - protein, 736 aa, Artificial Sequence
  Synthetic polypeptide
MAADGYLPDWLEDNLSEGIREWWDLKPGAPKPKANQQKQDDGRGLVLPGYKYLGPFNGLDKGEPVNAADAAALEHDKAYDQQLKAGDNPYLRYNHADAEFQERLQEDTSFGGNLGRAVFQAKKRVLEPLGLVEEGAKTAPGKKRPVEQSPQEPDSSSGIGKKGQQPAKKRLNFGQTGDSESVPDPQPLGEPPAAPSGVGSNTMASGGGAPMADNNEGADGVGNASGNWHCDSTWLGDRVITTSTRTWALPTYNNHLYKQISSQSGASTNDNTYFGYSTPWGYFDFNRFHCHFSPRDWQRLINNNWGFRPKRLNFKLFNIQVKEVTTNDGTTTIANNLTSTVQVFTDSEYQLPYVLGSAHQGCLPPFPADVFMIPQYGYLTLNNGSQAVGRSSFYCLEYFPSQMLRTGNNFQFSYTFEDVPFHSSYAHSQSLDRLMNPLIDQYLYYLSRTQTTSGTAGNRELQFSQAGPSSMANQAKNWLPGPCYRQQRVSKTTNQNNNSNFAWTGATKYHLNGRDSLVNPGPAMATHKDDEDKFFPMSGVLIFGKQGAGNSNVDLDNVMITNEEEIKTTNPVATEEYGTVATNLQSANTAPATGTVNSQGALPGMVWQNRDVYLQGPIWAKIPHTDGHFHPSPLMGGFGLKHPPPQILIKNTPVPANPPTTFSPAKFASFITQYSTGQVSVEIEWELQKENSKRWNPEIQYTSNYNKSTNVDFAVDTNGVYSEPRPIGTRYLTRNL

SEQ ID NO: 1045 - protein, 736 aa, Artificial Sequence
  Synthetic polypeptide
MAADGYLPDWLEDNLSEGIREWWDLKPGAPKPKANQQKQDDGRGLVLPGYKYLGPFNGLDKGEPVNAADAAALEHDKAYDQQLKAGDNPYLRYNHADAEFQERLQEDTSFGGNLGRAVFQAKKRVLEPLGLVEEGAKTAPGKKRPVEQSPQEPDSSSGIGKKGQQPARKRLNFGQTGDSESVPDPQPLGEPPAAPSGVGSNTMAAGGGAPMADNNEGADGVGNASGNWHCDSTWLGDRVITTSTRTWALPTYNNHLYKQISSQSGGSTNDNTYFGYSTPWGYFDFNRFHCHFSPRDWQRLINNNWGFRPKRLNFKLFNIQVKEVTTNDGTTTIANNLTSTVQVFTDSEYQLPYVLGSAHQGCLPPFPADVFMIPQYGYLTLNNGSQAVGRSSFYCLEYFPSQMLRTGNNFEFSYTFEDVPFHSSYAHSQSLDRLMNPLIDQYLYYLSRTQTTSGTAGNRELQFSQAGPSSMANQAKNWLPGPCYRQQRVSKTTNQNNNSNFAWTGATKYHLNGRDSLVNPGPAMATHKDDEDKFFPMSGVLIFGKQGAGNSNVDLDNVMITSEEEIKTTNPVATEEYGTVATNLQSSNTAPATGTVNSQGALPGMVWQERDVYLQGPIWAKIPHTDGHFHPSPLMGGFGLKHPPPQILIKNTPVPANPPTTFSPAKFASFITQYSTGQVSVEIEWELQKENSKRWNPEIQYTSNYNKSTNVDFAVDTNGVYSEPRPIGTRYLTRNL

SEQ ID NO: 1046 - protein, 736 aa, Artificial Sequence
  Synthetic polypeptide
MAADGYLPDWLEDNLSEGIREWWDLKPGAPKPKANQQKQDDGRGLVLPGYKYLGPFNGLDKGEPVNAADAAALEHDKAYDQQLKAGDNPYLRYNHADAEFQERLQEDTSFGGNLGRAVFQAKKRVLEPLGLVEEGAKTAPGKKRPVEQSPQEPDSSSGIGKKGQQPARKRLNFGQTGDSESVPDPQPLGEPPAAPSGVGSNTMASGGGAPMADNNEGADGVGNASGNWHCDSTWLGDRVITTSTRTWALPTYNNHLYKQISSQSGGSTNDNTYFGYSTPWGYFDFNRFHCHFSPRDWQRLINNNWGFRPKKLNFKLFNIQVKEVTTNDGTTTIANNLTSTVQVFTDSEYQLPYVLGSAHQGCLPPFPADVFMIPQYGYLTLNNGSQAVGRSSFYCLEYFPSQMLRTGNNFEFSYTFEDVPFHSSYAHSQSLDRLMNPLIDQYLYYLSRTQTTSGTAGNRELQFSQAGPSSMANQAKNWLPGPCYRQQRVSKTTNQNNNSNFAWTGATKYHLNGRDSLVNPGPAMATHKDDEDKFFPMSGVLIFGKQGAGNSNVDLDNVMITSEEEIKTTNPVATEEYGTVATNLQSANTAPATGTVNSQGALPGMVWQDRDVYLQGPIWAKIPHTDGHFHPSPLMGGFGLKHPPPQILIKNTPVPANPPTTFSPAKFASFITQYSTGQVSVEIEWELQKENSKRWNPEIQYTSNYNKSTNVDFAVDTNGVYSEPRPIGTRYLTRNL

SEQ ID NO: 1047 - protein, 736 aa, Artificial Sequence
  Synthetic polypeptide
MAADGYLPDWLEDNLSEGIREWWDLKPGAPKPKANQQKQDDGRGLVLPGYKYLGPFNGLDKGEPVNAADAAALEHDKAYDQQLKAGDNPYLRYNHADAEFQERLQEDTSFGGNLGRAVFQAKKRVLEPLGLVEEGAKTAPGKKRPVEQSPQEPDSSSGIGKKGQQPARKRLNFGQTGDSESVPDPQPLGEPPAAPSGVGSNTMAAGGGAPMADNNEGADGVGNASGNWHCDSTWLGDRVITTSTRTWALPTYNNHLYKQISSQSGGSTNDNTYFGYSTPWGYFDFNRFHCHFSPRDWQRLINNNWGFRPKKLNFKLFNIQVKEVTTNDGTTTIANNLTSTVQVFTDSEYQLPYVLGSAHQGCLPPFPADVFMIPQYGYLTLNNGSQAVGRSSFYCLEYFPSQMLRTGNNFQFSYTFEDVPFHSSYAHSQSLDRLMNPLIDQYLYYLSRTQTTSGTAGNRTLQFSQAGPSSMANQAKNWLPGPCYRQQRVSKTTNQNNNSNFAWTGATKYHLNGRDSLVNPGPAMATHKDDEDKFFPMSGVLIFGKQGAGNSNVDLDNVMITNEEEIKTTNPVATEEYGTVATNLQSANTAPATGTVNSQGALPGMVWQDRDVYLQGPIWAKIPHTDGHFHPSPLMGGFGLKHPPPQILIKNTPVPANPPTTFSPAKFASFITQYSTGQVSVEIEWELQKENSKRWNPEIQYTSNYNKSTNVDFAVDTNGVYSEPRPIGTRYLTRNL

SEQ ID NO: 1048 - protein, 736 aa, Artificial Sequence
  Synthetic polypeptide
MAADGYLPDWLEDNLSEGIREWWDLKPGAPKPKANQQKQDDGRGLVLPGYKYLGPFNGLDKGEPVNAADAAALEHDKAYDQQLKAGDNPYLRYNHADAEFQERLQEDTSFGGNLGRAVFQAKKRVLEPLGLVEEGAKTAPGKKRPVEQSPQEPDSSSGIGKKGQQPAKKRLNFGQTGDSESVPDPQPLGEPPAAPSGVGSNTMAAGGGAPMADNNEGADGVGNASGNWHCDSTWLGDRVITTSTRTWALPTYNNHLYKQISSQSGGSTNDNTYFGYSTPWGYFDFNRFHCHFSPRDWQRLINNNWGFRPKKLNFKLFNIQVKEVTTNDGTTTIANNLTSTVQVFTDSEYQLPYVLGSAHQGCLPPFPADVFMIPQYGYLTLNNGSQAVGRSSFYCLEYFPSQMLRTGNNFEFSYTFEDVPFHSSYAHSQSLDRLMNPLIDQYLYYLSRTQTTSGTAGNRTLQFSQAGPSSMANQAKNWLPGPCYRQQRVSKTANQNNNSNFAWTGATKYHLNGRDSLVNPGPAMATHKDDEDKFFPMSGVLIFGKQGAGNSNVDLDNVMITSEEEIKTTNPVATEQYGTVATNLQSSNTAPATGTVNSQGALPGMVWQNRDVYLQGPIWAKIPHTDGHFHPSPLMGGFGLKHPPPQILIKNTPVPANPPTTFSPAKFASFITQYSTGQVSVEIEWELQKENSKRWNPEIQYTSNYNKSTNVDFAVDTNGVYSEPRPIGTRYLTRNL

SEQ ID NO: 1049 - protein, 736 aa, Artificial Sequence
  Synthetic polypeptide
MAADGYLPDWLEDNLSEGIREWWDLKPGAPKPKANQQKQDDGRGLVLPGYKYLGPFNGLDKGEPVNAADAAALEHDKAYDQQLKAGDNPYLRYNHADAEFQERLQEDTSFGGNLGRAVFQAKKRVLEPLGLVEEGAKTAPGKKRPVEQSPQEPDSSSGIGKKGQQPAKKRLNFGQTGDSESVPDPQPLGEPPAAPSGVGSNTMASGGGAPMADNNEGADGVGNASGNWHCDSTWLGDRVITTSTRTWALPTYNNHLYKQISSQSGGSTNDNTYFGYSTPWGYFDFNRFHCHFSPRDWQRLINNNWGFRPKKLNFKLFNIQVKEVTTNDGTTTIANNLTSTVQVFTDSEYQLPYVLGSAHQGCLPPFPADVFMIPQYGYLTLNNGSQAVGRSSFYCLEYFPSQMLRTGNNFEFSYTFEDVPFHSSYAHSQSLDRLMNPLIDQYLYYLSRTQTTSGTAGNRTLQFSQAGPSSMANQAKNWLPGPCYRQQRVSKTANQNNNSNFAWTGATKYHLNGRDSLVNPGPAMATHKDDEDKFFPMSGVLIFGKQGAGNSNVDLDNVMITSEEEIKTTNPVATEEYGTVATNLQSSNTAPATGTVNSQGALPGMVWQNRDVYLQGPIWAKIPHTDGHFHPSPLMGGFGLKHPPPQILIKNTPVPANPPTTFSPAKFASFITQYSTGQVSVEIEWELQKENSKRWNPEIQYTSNYNKSTNVDFAVDTNGVYSEPRPIGTRYLTRNL

SEQ ID NO: 1050 - protein, 736 aa, Artificial Sequence
  Synthetic polypeptide
MAADGYLPDWLEDNLSEGIREWWDLKPGAPKPKANQQKQDDGRGLVLPGYKYLGPFNGLDKGEPVNAADAAALEHDKAYDQQLKAGDNPYLRYNHADAEFQERLQEDTSFGGNLGRAVFQAKKRVLEPLGLVEEGAKTAPGKKRPVEQSPQEPDSSSGIGKKGQQPAKKRLNFGQTGDSESVPDPQPLGEPPAAPSGVGSNTMASGGGAPMADNNEGADGVGNASGNWHCDSTWLGDRVITTSTRTWALPTYNNHLYKQISSQSGGSTNDNTYFGYSTPWGYFDFNRFHCHFSPRDWQRLINNNWGFRPKKLNFKLFNIQVKEVTTNDGTTTIANNLTSTVQVFTDSEYQLPYVLGSAHQGCLPPFPADVFMIPQYGYLTLNNGSQAVGRSSFYCLEYFPSQMLRTGNNFQFSYTFEDVPFHSSYAHSQSLDRLMNPLIDQYLYYLSRTQTTSGTAGNRELQFSQAGPSSMANQAKNWLPGPCYRQQRVSKTTNQNNNSNFAWTGATKYHLNGRDSLVNPGPAMATHKDDEDKFFPMSGVLIFGKQGAGNSNVDLDNVMITNEEEIKTTNPVATEQYGTVATNLQSANTAPATGTVNSQGALPGMVWQDRDVYLQGPIWAKIPHTDGHFHPSPLMGGFGLKHPPPQILIKNTPVPANPPTTFSPAKFASFITQYSTGQVSVEIEWELQKENSKRWNPEIQYTSNYNKSTNVDFAVDTNGVYSEPRPIGTRYLTRNL

SEQ ID NO: 1051 - DNA, 2211 bp, Artificial Sequence
  Synthetic polynucleotide
atggctgccgatggttatcttccagattggctcgaggacaacctctctgagggcattcgcgagtggtgggacttgaaacctggagccccgaaacccaaagccaaccagcaaaagcaggacgacggccggggtctggtgcttcctggctacaagtacctcggacccttcaacggactcgacaagggggagcccgtcaacgcggcggacgcagcggccctcgagcacgacaaggcctacgaccagcagctcaaagcgggtgacaatccgtacctgcggtataaccacgccgacgccgagtttcaggagcgtctgcaagaagatacgtcttttgggggcaacctcgggcgagcagtcttccaggccaagaagcgggttctcgaacctctcggtctggttgaggaaggcgctaagacggctcctggaaagaagagaccggtagagcaatcaccccaggaaccagactcctcttcgggcatcggcaagaaaggccagcagcccgcgaaaaagagactcaactttgggcagacaggcgactcagagtcagtgcccgaccctcaaccactcggagaaccccccgcagccccctctggtgtgggatctaatacaatggctgcaggcggtggcgctccaatggcagacaataacgaaggcgccgacggagtgggtaacgcctcaggaaattggcattgcgattccacatggctgggcgacagagtcatcaccaccagcacccgaacctgggccctccccacctacaacaaccacctctacaagcaaatctccagccaatcgggagcaagcaccaacgacaacacctacttcggctacagcaccccctgggggtattttgactttaacagattccactgccacttctcaccacgtgactggcagcgactcatcaacaacaactggggattccggcccaagagactcaacttcaagctcttcaacatccaggtcaaggaggtcacgacgaatgatggcaccacgaccatcgccaataaccttaccagcacggttcaggtctttacggactcggaataccagctcccgtacgtcctcggctctgcgcaccagggctgcctgcctccgttcccggcggacgtcttcatgattcctcagtacgggtacctgactctgaacaatggcagtcaggccgtgggccgttcctccttctactgcctggagtactttccttctcaaatgctgagaacgggcaacaactttgagttcagctacacgtttgaggacgtgccttttcacagcagctacgcgcacagccaaagcctggaccggctgatgaaccccctcatcgaccagtacctgtactacctgtctcggactcagaccacgagtggtaccgcaggaaatcggacgttgcaattttctcaggccgggcctagtagcatggcgaatcaggccaaaaactggctacccgggccctgctaccggcagcaacgcgtctccaagacagcgaatcaaaataacaacagcaactttgcctggaccggtgccaccaagtatcatctgaatggcagagactctctggtaaatcccggtcccgctatggcaacccacaaggacgacgaagacaaattttttccgatgagcggagtcttaatatttgggaaacagggagctggaaatagcaacgtggaccttgacaacgttatgataaccagtgaggaagaaattaaaaccaccaacccagtggccacagaacagtacggcacggtggccactaacctgcaatcgtcaaacaccgctcctgctacagggaccgtcaacagtcaaggagccttacctggcatggtctggcagaaccgggacgtgtacctgcagggtcctatctgggccaagattcctcacacggacggacactttcatccctcgccgctgatgggaggctttggactgaaacacccgcctcctcagatcctgattaagaatacacctgttcccgcgaatcctccaactaccttcagtccagctaagtttgcgtcgttcatcacgcagtacagcaccggacaggtcagcgtggaaattgaatgggagctgcagaaagaaaacagcaaacgctggaacccagagattcaatacacttccaactacaacaaatctacaaatgtggactttgctgttgacacaaatggcgtttattctgagcctcgccccatcggcacccgttacctcacccgtaatctgtaa

SEQ ID NO: 1052 - protein, 738 aa, Artificial Sequence; identical to SEQ ID NO: 12
  Synthetic polypeptide

SEQ ID NO: 1053 - DNA, 2211 bp, Artificial Sequence
  Synthetic polynucleotide
atggctgccgatggttatcttccagattggctcgaggacaacctctctgagggcattcgcgagtggtgggacttgaaacctggagccccgaaacccaaagccaaccagcaaaagcaggacgacggccggggtctggtgcttcctggctacaagtacctcggacccttcaacggactcgacaagggggagcccgtcaacgcggcggacgcagcggccctcgagcacgacaaggcctacgaccagcagctcaaagcgggtgacaatccgtacctgcggtataaccacgccgacgccgagtttcaggagcgtctgcaagaagatacgtcttttgggggcaacctcgggcgagcagtcttccaggccaagaagcgggttctcgaaccttttggtctggttgaggaaggcgctaagacggctcctggaaagaaacgtccggtagagcagtcgccacaagagccagactcctcctcgggcatcggcaagacaggccagcagcccgctaaaaagagactcaattttggtcagactggcgactcagagtcagtccccgacccacaacctctcggagaacctccagcaacccccgctgctgtgggacctactacaatggcttcaggcggtggcgcaccaatggcagacaataacgaaggcgccgacggagtgggtaatgcctcaggaaattggcattgcgattccacatggctgggcgacagagtcatcaccaccagcacccgcacctgggccttgcccacctacaataaccacctctacaagcaaatctccagtgcttcaacgggggccagcaacgacaaccactacttcggctacagcaccccctgggggtattttgatttcaacagattccactgccacttttcaccgcgtgactggcagcgactcatcaacaacaattggggattccggcccaagagactcaacttcaagctcttcaacatccaagtcaaggaggtcacgacgagtgatggcgtcacaaccatcgctaataaccttaccagcacggttcaagtcttctcggactcggagtaccagcttccgtacgtcctcggctctgcgcaccagggctgcctccctccgttcccggcggacgtgttcatgattccgcaatacggctacctgacgctcaacaatggcagccaagccgtgggacgttcatccttttactgcctggaatatttcccttctcagatgctgagaacgggcaacaactttaccttcagctacacctttgaggaagtgcctttccacagcagctacgcgcacagccagagcctggaccggctgatgaatcctctcatcgaccaatacctgtattacctgaacagaactcaaaatcagtccggaagtgcccaaaacaaggacttgctgtttagccgtgggtctccagctggcatgtctgttcagcccaaaaactggctacctggaccctgttatcggcagcagcgcgtttctaaaacaaaaacaggcaacaacaacagcaattttacctggactggtgcttcaaaatataacctcaatgggcatgaatccatcatcaaccctggcactgctatggcctcacacaaagacgacgaagacaagttctttcccatgagcggtgtcatgatttttggaaaagagagcgccggagcttcaaacactgcattggacaatgtcatgattacagacgaagaggaaattaaagccactaaccctgtggccaccgaaagatttgggaccgtggcagtcaatttccagagcagcagcacacaccctgcgaccggagatgtgcatgttatgggagcattacctggcatggtgtggcaagatagagacgtgtacctgcagggtcccatctgggccaaaattcctcacacagatggacactttcacccgtctcctcttatgggcggctttggactcaagcacccgcctcctcagatcctcatcaaaaacacgcctgttcctgcgaatcctccggcggagttttcagctacaaagtttgcttcattcatcacccaatactccacaggacaagtgagtgtggaaattgaatgggagctgcagaaagaaaacagcaagcgctggaatcccgaagtgcagtacacatccaattatgcaaaatctgccaacgttgattttaccgtggacaacaatggactttatactgagcctcgccccattggcacccgttaccttacccgtcccctgtaa

SEQ ID NO: 1054 - DNA, 2211 bp, Artificial Sequence; identical to SEQ ID NO: 1053
  Synthetic polynucleotide

SEQ ID NO: 1055 - DNA, 2202 bp, Artificial Sequence
  Synthetic polynucleotide
atgactgacggttaccttccagattggctagaggacaacctctctgaaggcgttcgagagtggtgggcgctgcaacctggagcccctaaacccaaggcaaatcaacaacatcaggacaacgctcggggtcttgtgcttccgggttacaaatacctcggacccggcaacggacttgacaagggggaacccgtcaacgcagcggacgcggcagccctcgaacacgacaaggcctacgaccagcagctcaaggccggtgacaacccctacctcaagtacaaccacgccgacgccgagtttcaggagcgtcttcaagaagatacgtcttttgggggcaacctcggacgagcagtcttccaggccaaaaagaggatccttgagcctctgggtctggttgaggaagcggctaagacggctcctggaaaaaagagacctgtagagcaatctccagcagaaccggactcctcttcgggcatcggcaaatcaggccagcagcccgctagaaaaagactgaattttggtcagactggcgacacagagtcagtcccagaccctcaaccactcggacaacctcccgcagccccctctggtgtgggatctactacaatggcttcaggcggtggcgcaccaatggcagacaataacgagggtgccgatggagtgggtaattcctcaggaaattggcattgcgattcccaatggctgggcgacagagtcatcaccaccagcacccgcacctgggccctgcccacctacaacaatcacctctacaagcaaatctccagccaatcaggagccaccaacgacaaccactactttggctacagcaccccctgggggtattttgacttcaacagattccactgccacttttcaccacgtgactggcaaagactcatcaacaacaactggggattccgacccaagagactcaacttcaagctctttaacattcaagtcaaagaggtcacgcagaatgacggtacgacgacgattgccaataaccttaccagcacggttcaggtgtttactgactccgagtaccagctcccgtacgtcctcggctcggcgcatcagggatgcctcccgccgttcccagcagacgtcttcatggtcccacagtatggatacctcaccctgaacaacgggagtcaggcggtaggacgctcttccttttactgcctggagtactttccttctcagatgctgcgtactggaaacaactttcagtttagctacacttttgaagacgtgcctttccacagcagctacgctcacagccaaagtctggaccgtctcatgaatcctctgatcgaccagtacctgtactatctgaacaggacacaaacagccagtggaactcagcagtctcggctactgtttagccaagctggacccaccagtatgtctcttcaagctaaaaactggctgcctggaccttgctacagacagcagcgtctgtcaaagcaggcaaacgacaacaacaacagcaactttccctggactggtgccaccaaatatcatctgaatggccgggactcattggtgaacccgggccctgctatggccagtcacaaggatgacaaagaaaagtttttccccatgcatggaaccctgatatttggtaaagaaggaacaaatgccaacaacgcggatttggaaaatgtcatgattacagatgaagaagaaatccgcaccaccaatcccgtggctacggagcagtacgggactgtgtcaaataatttgcaaaactcaaacgctggtccaactactggaactgtcaatcaccaaggagcgttacctggtatggtgtggcaggatcgagacgtgtacctgcagggacccatttgggccaagattcctcacaccgatggacactttcatccttctccactgatgggaggttttgggctcaaacacccgcctcctcagatcatgatcaaaaacactcccgttccagccaatcctcccacaaactttagtgcggcaaagtttgcttccttcatcacacagtactccacggggcaggtcagcgtggagatcgagtgggagctgcagaaggagaacagcaaacgctggaatcccgaaattcagtacacttccaactacaacaaatctgttaatgtggactttactgtggacactaatggtgtgtattcagagcctcgccccattggcaccagatacctgactcgtaatctgtaa

SEQ ID NO: 1056 - DNA, 2211 bp, Artificial Sequence
  Synthetic polynucleotide
atggctgccgatggttatcttccagattggctcgaggacaacctctctgagggcattcgcgagtggtgggacttgaaacctggagccccgaaacccaaagccaaccagcaaaagcaggacgacggccggggtctggtgcttcctggctacaagtacctcggacccttcaacggactcgacaagggggagcccgtcaacgcggcggacgcagcggccctcgagcacgacaaggcctacgaccagcagctcaaagcgggtgacaatccgtacctgcggtataaccacgccgacgccgagtttcaggagcgtctgcaagaagatacgtcttttgggggcaacctcgggcgagcagtcttccaggccaagaagcgggttctcgaaccttttggtctggttgaggaaggcgctaagacggctcctggaaagaaacgtccggtagagcagtcgccacaagagccagactcctcctcgggcatcggcaagacaggccagcagcccgctaaaaagagactcaattttggtcagactggcgactcagagtcagtccccgacccacaacctctcggagaacctccagcaacccccgctgctgtgggacctactacaatggcttcaggcggtggcgcaccaatggcagacaataacgaaggcgccgacggagtgggtaatgcctcaggaaattggcattgcgattccacatggctgggcgacagagtcatcaccaccagcacccgcacctgggccttgcccacctacaataaccacctctacaagcaaatctccagtgcttcaacgggggccagcaacgacaaccactacttcggctacagcaccccctgggggtattttgatttcaacagattccactgccacttttcaccacgtgactggcagcgactcatcaacaacaattggggattccggcccaagagactcaacttcaagctcttcaacatccaagtcaaggaggtcacgacgaatgatggcgtcacaaccatcgctaataaccttaccagcacggttcaagtcttctcggactcggagtaccagcttccgtacgtcctcggctctgcgcaccagggctgcctccctccgttcccggcggacgtgttcatgattccgcaatacggctacctgacgctcaacaatggcagccaagccgtgggacgttcatccttttactgcctggaatatttcccttctcagatgctgagaacgggcaacaactttaccttcagctacacctttgaggaagtgcctttccacagcagctacgcgcacagccagagcctggaccggctgatgaatcctctcatcgaccaatacctgtattacctgaacagaactcaaaatcagtccggaagtgcccaaaacaaggacttgctgtttagccgtgggtctccagctggcatgtctgttcagcccaaaaactggctacctggaccctgttatcggcagcagcgcgtttctaaaacaaaaacagacaacaacaacagcaattttacctggactggtgcttcaaaatataacctcaatgggcgtgaatccatcatcaaccctggcactgctatggcctcacacaaagacgacgaagacaagttctttcccatgagcggtgtcatgatttttggaaaagagagcgccggagcttcaaacactgcattggacaatgtcatgattacagacgaagaggaaattaaagccactaaccctgtggccaccgaaagatttgggaccgtggcagtcaatttccagagcagcagcacagaccctgcgaccggagatgtgcatgttatgggagcattacctggcatggtgtggcaagatagagacgtgtacctgcagggtcccatctgggccaaaattcctcacacagatggacactttcacccgtctcctcttatgggcggctttggactcaagcacccgcctcctcagatcctcatcaaaaacacgcctgttcctgcgaatcctccggcggagttttcagctacaaagtttgcttcattcatcacccaatactccacaggacaagtgagtgtggaaattgaatgggagctgcagaaagaaaacagcaagcgctggaatcccgaagtgcagtacacatccaattatgcaaaatctgccaacgttgattttaccgtggacaacaatggactttatactgagcctcgccccattggcacccgttaccttacccgtcccctgtaa

SEQ ID NO: 1057 - DNA, 2211 bp, Artificial Sequence
  Synthetic polynucleotide
atggctgccgatggttatcttccagattggctcgaggacaacctctctgagggcattcgcaagtggtgggacttgaaacctggagccccgaaacccaaagccaaccagcaaaagcaggacgacggccggggtctggtgcttcctggctacaagtacctcggacccttcaacggactcgacaagggggagcccgtcaacgcggcggacgcagcggccctcgagcacgacaaggcctacgaccagcagctcaaagcgggtgacaatccgtacctgcggtataaccacgccgacgccgagtttcaggagcgtctgcaagaagatacgtcttttgggggcaacctcgggagagcagtcttccaggccaagaagcgggttctcgaaccttttggtctggttgaggaaggcgctaagacggctcctggaaagaaacgtccggtagagcagtcgccacaagagccagactcctcctcgggcatcggcaagacaggccagcagcccgctaaaaagagactcaattttggtcagactggcgactcagagtcagtccccgacccacaacctctcggagaacctccagcaacccccgctgctgtgggacctactacaatggcttcaggcggtggcgcaccaatggcagacaataacgaaggcgccgacggagtgggtaatgcctcaggaaattggcattgcgattccacatggctgggcgacagagtcatcaccaccagcacccgcacctgggccttgcccacctacaataaccacctctacaagcaaatctccagtgcttcaacgggggccagcaacgacaaccactacttcggctacagcaccccctgggggtattttgatttcaacagattccactgccacttttcaccacgtgactggcagcgactcatcaacaacaattggggattccggcccaagagactcaacttcaagctcttcaacatccaagtcaaggaggtcacgacgaatgatggcgtcacaaccatcgctaataaccttaccagcacggttcaagtcttctcggactcggagtaccagcttccgtacgtcctcggctctgcgcaccagggctgcctccctccgttcccggcggacgtgttcatgattccgcaatacggctacctgacgctcaacaatggcagccaagccgtgggacgttcatccttttactgcctggaatatttcccttctcagatgctgagaacgggcaacaactttaccttcagctacacctttgaggaagtgcctttccacagcagctacgcgcacagccagagcctggaccggctgatgaatcctctcatcgaccaatacctgtattacctgaacagaactcaaaatcagtccggaagtgcccaaaacaaggacttgctgtttagccgtgggtctccagctggcatgtctgttcagcccaaaaactggctacctggaccctgttatcggcagcagcgcgtttctaaaacaaaaacagacaacaacaacagcaattttacctggactggtgcttcaaaatataacctcaatgggcgtgaatccatcatcaaccctggcactgctatggcctcacacaaagacgacaaagacaagttctttcccatgagcggtgtcatgatttttggaaaagagagcgccggagcttcaaacactgcattggacaatgtcatgattacagacgaagaggaaattaaagccactaaccctgtggccaccgaaagatttgggaccgtggcagtcaatttccagagcagcagcacagaccctgcgaccggagatgtgcatgttatgggagcattacctggcatggtgtggcaagatagagacgtgtacctgcagggtcccatttgggccaaaattcctcacacagatggacactttcacccgtctcctcttatgggcggctttggactcaagcacccgcctcctcagatcctcatcaaaaacacacctgttcctgcgaatcctccggcggagttttcagctacaaagtttgcttcattcatcacccaatactccacaggacaagtgagtgtggaaattgaatgggagctgcagaaagaaaacagcaagcgctggaatcccgaagtgcagtacacatccaattatgcaaaatctgccaacgttgattttaccgtggacaacaatggactttatactgagcctcgccccattggcacccgttaccttacccgtcccctgtaa

SEQ ID NO: 1058 - DNA, 2211 bp, Artificial Sequence
  Synthetic polynucleotide
atggctgccgatggttatcttccagattggctcgaggacaacctctctgagggcattcgcgagtggtgggacttgaaacctggagccccgaaacccaaagccaaccagcaaaagcaggacaacggccggggtctggtgcttcctggctacaagtacctcggacccttcaacggactcgacaagggggagcccgtcaacgcggcggacgcagcggccctcgagcacgacaaggcctacgaccagcagctcaaagcgggtgacaatccgtacctgcggtataaccacgccgacgccgagtttcaggagcgtctgcaagaagatacgtcttttgggggcaacctcgggcgagcagtcttccaggccaagaagcgggttctcgaaccttttggtctggttgaggaaggcgctaagacggctcctggaaagaaacgtccggtagagcagtcgccacaagagccagactcctcctcgggcatcggcaagacaggccagcagcccgctaaaaagagactcaattttggtcagactggcgactcagagtcagtccccgacccacaacctctcggagaacctccagcaacccccgctgctgtgggacctactacaatggcttcaggcggtggcgcaccaatggcagacaataacgaaggcgccgacggagtgggtaatgcctcaggaaattggcattgcgattccacatggctgggcgacagagtcatcaccaccagcacccgcacctgggccttgcccacctacaataaccacctctacaagcaaatctccagtgcttcaacgggggccagcaacgacaaccactacttcggctacagcaccccctgggggtattttgatttcaacagattccactgccacttttcaccacgtgactggcagcgactcatcaacaacaattggggattccggcccaagagactcaacttcaagctcttcaacatccaagtcaaggaggtcacgacgaatgatggcgtcacaaccatcgctaataaccttaccagcacggttcaagtcttctcggactcggagtaccagcttccgtacgtcctcggctctgcgcaccagggctgcctccctccgttcccggcggacgtgttcatgattccgcaatacggctacctgacgctcaacaatggcagccaagccgtgggacgttcatccttttactgcctggaatatttcccttctcagatgctgagaacgggcaacaactttaccttcagctacacctttgaggaagtgcctttccacagcagctacgcgcacagccagagcctggaccggctgatgaatcctctcatcgaccaatacctgtattacctgaacagaactcaaaatcagtccggaagtgcccaaaacaaggacttgctgtttagccgtgggtctccagctggcatgtctgttcagcccaaaaactggctacctggaccctgttatcggcagcagcgcgtttctaaaacaaaaacagacaacaacaacagcaattttacctggactggtgcttcaaaatataacctcaatgggcgtgaatccatcatcaaccctggcactgctatggcctcacacaaagacgacgaagacaagttctttcccatgagcggtgtcatgatttttggaaaagagagcgccggagcttcaaacactgcattggacaatgtcatgattacagacgaagaggaaattaaagccactaaccctgtggccaccgaaagatttgggaccgtggcagtcaatttccagagcagcagcacacaccctgcgaccggagatgtgcatgttatgggagcattacctggcatggtgtggcaagatagagacgtgtacctgcagggtcccatctgggccaaaattcctcacacagatggacactttcacccgtctcctcttatgggcggctttggactcaagcacccgcctcctcagatcctcatcaaaaacacgcctgttcctgcgaatcctccggcggagttttcagctacaaagtttgcttcattcatcacccaatactccacaggacaagtgagtgtggaaattgaatgggagctgcagaaagaaaacagcaagcgctggaatcccgaagtgcagtacacatccaattatgcaaaatctgccaacgttgattttaccgtggacaacaatggactttatactgagcctcgccccattggcacccgttaccttacccgtcccctgtaa

SEQ ID NO: 1059 - DNA, 2211 bp, Artificial Sequence
  Synthetic polynucleotide
atggctgccgatggttatcttccagattggctcgaggacaacctctctgagggcattcgcgagtggtgggacttgaaacctggagccccgaaacccaaagccaaccagcaaaagcaggacgacggccggggtctggtgcttcctggctacaagtacctcggacccttcaacggactcgacaagggggagcccgtcaacgcggcggacgcagcggccctcgagcacgacaaggcctacgaccagcagctcaaagcgggtgacaatccgtacctgcggtataaccacgccgacgccgagtttcaggagcgtctgcaagaagatacgtcttttgggggcaacctcgggcgagcagtcttccaggccaaaaagcgggttctcgaaccttttggtctggttgaggaaggcgctaagacggctcctggaaagaaacgtccggtagagcagtcgccacaagagccagactcctcctcgggcatcggcaagacaggccagcagcccgctaaaaagagactcaattttggtcagactggcgactcagagtcagtccccgacccacaacctctcggagaacctccagcaacccccgctgctgtgggacctactacaatggcttcaggcggtggcgcaccaatggcagacaataacgaaggcgccgacggagtgggtaatgcctcaggaaattggcattgcgattccacatggctgggcgacagagtcatcaccaccagcacccgcacctgggccttgcccacctacaataaccacctctacaagcaaatctccagtgcttcaacgggggccagcaacgacaaccactacttcggctacagcaccccctgggggtattttgatttcaacagattccactgccacttttcaccacgtgactggcagcgactcatcaacaacaattggggattccggcccaagagactcaacttcaagctcttcaacatccaagtcaaggaggtcacgacgaatgatggcgtcacaaccatcgctaataaccttaccagcacggttcaagtcttctcggactcggagtaccagcttccgtacgtcctcggctctgcgcaccagggctgcctccctccgttcccggcggacgtgttcatgattccgcaatacggctacctgacgctcaacaatggcagccaagccgtgggacgttcatccttttattgcctggaatatttcccatcgcagatgctgagaacgggcaataactttaccttcagctacacctttgaggacgtgcctttccacagcagctacgcgcacagccagagcctggaccggctgatgaatcctctcatcgaccagtacctgtattacctgaacagaactcagaaccagtccggaagtgcccaaaacaaggacttgctgtttagccgggggtctccagctggcatgtctgttcagctcaaaaactggctacctggaccctgttatcggcagcagcgcgtttctaaaacaaaaacagacaacaacaacagcaattttacctggactggtgcttcaaaatataaccttaatgggcgtgaatccatcatcaaccctggcactgctatggcctcacacaaagacgacgaagacaagttctttcccatgagcggtgtcatgatttttggaaaagagagcgccggagcttcaaacactgcattggacaatgtcatgattacagacgaagaggaaattaaagccactaaccctgtggccaccgaaagatttgggaccgtggcagtcaatttccagagcagcagcacagaccctgcgaccggagatgtgcatgttatgggagcattacctggcatggtgtggcaagatagagacgtgtacctgcagggtcccatttgggccaaaattcctcacacagatggacactttcacccgtctcctcttatgggcggctttggactcaaacacccgcctcctcagatcctcatcaaaaacacacctgttcctgcgaatcctccggcggagttttcagctacaaagtttgcttcattcatcacccaatactccacaggacaagtgagcgtggaaattgaatgggagctgcagaaagaaaacagcaagcgctggaatcccgaagtgcagtacacatccaattatgcaaaatctgccaacgttgattttaccgtggacaacaatggactttatactgagcctcgccccattggcacccgttaccttacccgtcccctgtaa

SEQ ID NO: 1060 - DNA, 2211 bp, Artificial Sequence
  Synthetic polynucleotide
atggctgccgatggttatcttccagattggctcgaggacaacctctctgagggcattcgcgagtggtgggacttgaaacctggagccccgaaacccaaagccaaccagcaaaagcaggacgacggccggggtctggtgcttcctggctacaagtacctcggacccttcaacggactcgacaagggggagcccgtcaacgcggcggacgcagcggccctcgagcacgacaaggcctacgaccagcagctcaaagcgggtgacaatccgtacctgcggtataaccacgccgacgccgagtttcaggagcgtctgcaagaagatacgtcttttgggggcaacctcgggcgagcagtcttccaggccaagaagcgggttctcgaaccttttggtctggttgaggaaggtgctaagacggctcctggaaagaagagaccggtagagcagtcgccccaagaaccagactcctcatcgggcatcggcaaatcaggccagcagcccgctaaaaagagactcaattttggtcagactggcgactcagagtcagtccccgacccacaacctctcggagaacctccagcaacccccgctgctgtgggacctactacaatggcttcaggcggtggcgcaccaatggcagacaataacgaaggcgccgacggagtgggtaatgcctcaggaaattggcattgcgattccacatggctgggcgacagagtcattaccaccagcacccgaacctgggccctgcccacctataacaaccacctctacaaacaaatctccagcgcttcaacgggggccagcaacgacaaccactacttcggctacagcaccccctgggggtattttgattttaacagattccactgccacttctcaccacgtgactggcagcgactcatcaacaacaattggggattccggcccaagagactcaacttcaagctcttcaacatccaagtcaaggaggtcacgacgaacgatggcgtcacgaccatcgctaataaccttaccagcacggttcaagtcttctcggactcggagtaccagttgccgtacgtcctcggctctgcgcaccagggctgcctccctccgttcccggcggacgtgttcatgattccgcagtacggctacctaacactcaacaatggcagccaggccgtgggacgttcatccttttactgcctggaatatttcccatcgcagatgctgagaacgggcaataactttaccttcagctacacattcgaggacgtgcctttccacagcagctacgcgcacagccaaagcctggaccggctgatgaatcctctcatcgaccagtacttgtattacctaaacagaactcaaaatcagtccggaagtgcccaaaacaaggacttgctgtttagccgggggtctccagctggcatgtctgttcagcccaaaaactggctacctggaccctgttatcggcagcagcgcgtttctaaaacaaaaacagacaacaacaacagcaactttacctggactggtgcttcaaaatataaccttaatgggcgtgaatctataatcaaccctggcactgctatggcttcacacaaagacgacgaagacaagttctttccaatgagcggtgtcatgatttttggcaaggagagcgccggagcttcaaacactgcattggacaatgtcatgattacagacgaagaggaaattaaagccactaaccctgtggccaccgaaagatttgggaccgtggcagtcaatttccagagcagcagcacagaccctgcgaccggagatgtgcatgttatgggagcattacctggcatggtgtggcaagatagagacgtgtacctgcagggtccaatttgggccaaaattcctcacacagatggacactttcacccgtctcctcttatgggcggctttggacttaagcacccgcctcctcagatcctcatcaaaaacacgcctgttcctgcgaatcctccggcagagttttcggctacaaagtttgcttcattcatcacccagtattccacaggacaagtgagtgtggaaattgaatgggagttgcagaaagaaaacagcaagcgttggaatcccgaagtgcagtacacatctaattatgcaaaatctgccaacgttgatttcactgtggacaacaatggactttatactgagcctcgccccattggcacccgttacctcacccgtcccctgtaa

SEQ ID NO: 1061 - DNA, 2211 bp, Artificial Sequence
  Synthetic polynucleotide
atggctgccgatggttatcttccagattggctcgaggacaacctctctgagggcattcgcgagtggtgggacttgaaacctggagccccgaaacccaaagccaaccagcaaaagcaggacgacggccggggtctggtgcttcctggctacaagtacctcggacccttcaacggactcgacaagggggagcccgtcaacgcggcggacgcagcggccctcgagcacgacaaggcctacgaccagcagctcaaagcgggtgacaatccgtacctgcggtataaccacgccgacgccgagtttcaggagcgtctgcaagaagatacgtcttttgggggcaacctcgggcgagcagtcttccaggccaagaagagggttctcgaaccttttggtctggttgaggaaggtgctaagacggctcctggaaagaaacgtccggtagagcagtcaccccaagaaccagactcctcctcgggcattggcaaatcaggccagcagcccgctaaaaagagactcaattttggtcagactggcgactcagagtcagtccccgacccacaacctctcggagaacctccagcaacccccgctgctttgggacctactacaatggcttcaggcggtggcgcaccaatggcagacaataacgaaggcgccgacggagtgggtaatgcctcaggaaattggcattgcgattccacatggctgggcgacagagtcatcaccaccagcacccgcacctgggccttgcccacctacaataaccacctctacaagcaaatctccagtgcttcaacgggggccagcaacgacaaccactacttcggctacagcaccccctgggggtattttgatttcaacagattccactgccatttctcaccacgtgactggcagcgactcatcaacaacaactggggattccggcccaagagactcaacttcaagctcttcaacatccaagtcaaggaggtcacgacgaacgatggcgtcacgaccatcgctaataaccttaccagcacggttcaagtcttctcggactcggagtaccagcttccgtacgtcctcggctctgcgcaccagggctgcctccctccgttcccggcggacgtgttcatgattccgcagtacggctacctgacgctcaacaatggcagcaaagccgtgggacgttcatccttttactgcctggaatatttcccttctcagatgctgagaacgggcaacaactttaccttcagctacacctttgaggaagtgcctttccacagcagctacgcgcacagccagagcctggaccggctgatgaatcctctcatcgaccaatacctgtattacctgaacagaactcaaaatcagtccggaagtgcccaaaacaaggacttgctgtttagccgtgggtctccagctggcatgtctgttcagcccaaaaactggctacctggaccctgttatcggcagcagcgcgtttctaaaacaaaaacagacaacaacaacagcaattttacctggactggtgcttcaaaatataacctcaatgggcgtgaatccatcatcaaccctggcactgctatggcctcacacaaagacgacgaagacaagttctttcccatgagcggtgtcatgatttttggaaaagagagcgccggagcttcaaacactgcattggacaatgtcatgattacagacgaagaggaaattaaagccactaaccctgtggccaccgaaagatttgggaccgtggcagtcaatttccagagcagcagcacagaccctgcgaccggagatgtgcatgttatgggagcattacctggcatggtgtggcaagatagagacgtgtacctgcagggtcccatttgggccaaaattcctcacacggatggacactttcacccgtctcctcttatgggcggctttggactcaagcacccgcctcctcagatcctcatcaaaaacacacctgttcctgcgaatcctccggcagagttttcggctacaaagtttgcttcattcatcacccagtactccacaggacaagtgagcgtggaaattgaatgggagttgcagaaagaaaacagtaagcgctggaatcccgaagtgcagtacacatctaattatgcaaaatctgccaacgttgacttcactgtggacaacaatggactttatactgagcctcgccccattggcacccgttacctcacccgtcccctgtaa

SEQ ID NO: 1062 - DNA, 2970 bp, Artificial Sequence
  Synthetic polynucleotide
agatgaccgccaaggtcgtagagtccgccaaggccattctgggcggcagcaaggtgcgcgtggaccaaaaatgcaaggcctctgcgcagatcgaccccacccccgtgatcgtcacctccaacaccaacatgtgcgccgtgattgacgggaacagcaccaccttcgagcaccagcagcccctgcaggaccggatgttcaagtttgaactcacccgccgcctcgactacgactttggcaaggtcaccaagcaggaagtcaaggactttttccggtgggcggctgatcacgtgactgacgtggctcatgagttttacgtcacaaagggtggagctaagaaaaggcccgccccctctgacgaggatataagcgagcccaagcggccgcgcgtgtcatttgcgcagccggagacgtcagacgcggaagctcccggagacttcgccgacaggtaccaaaacaaatgttctcgtcacgcgggtatgctgcagatgctctttccctgcaagacgtgcgagagaatgaatcagaattccaacgtctgcttcacgcacggtcagaaagattgcggggagtgctttcccgggtcagaatctcaaccggtttctgtcgtcagaaaaacgtatcagaaactgtgcatccttcatcagctccggggggcacccgagatcgcctgctctgcttgcgaccaactcaaccccgatttggacgattgccaatttgagcaataaatgactgaaatcaggtatggctgctgacggttatcttccagattggctcgaggacaacctctctgaaggcattcgcgagtggtgggcgctgaaacctggagctccacaacccaaggccaaccaacagcatcaggacaacggcaggggtcttgtgcttcctgggtacaagtacctcggacccttcaacggactcgacaagggagagccggtcaacgaggcagacgccgcggccctcgagcacgacaaggcctacgacaagcagctcgagcagggggacaacccgtatctcaagtacaaccacggcgacgccgagttccagcagcgcttggcgaccgacacctcttttgggggcaacctcgggcgagcagtcttccaggccaaaaagaggattctcgagcctctgggtctggttgaagagggcgttaaaacggctcctggaaagaaacgcccattagaaaagactccaaatcggccgaccaacccggactctgggaaggccccggccaagaaaaagcaaaaagacggcgaaccagccgactctgctagaaggacactcgactttgaagactctggagcaggagacggaccccctgagggatcatcttccggagaaatgtctcatgatgctgagatgcgtgcggcgccaggcggaaatgctgtcgaggcgggacaaggtgccgatggagtgggtaatgcctccggtgattggcattgcgattccacctggtcagagggccgagtcaccaccaccagcacccgaacctgggtcctacccacgtacaacaaccacctgtacctgcgaatcggaacaacggccaacagcaacacctacaacggattctccaccccctggggatactttgactttaaccgcttccactgccacttttccccacgcgactggcagcgactcatcaacaacaactggggactcaggccgaaatcgatgcgtgttaaaatcttcaacatacaggtcaaggaggtcacgacgtcaaacggcgagactacggtcgctaataaccttaccagcacggttcagatctttgcggattcgacgtatgaactcccatacgtgatggacgccggtcaggaggggagctttcctccgtttcccaacgacgtctttatggttccccaatacggatactgcggagttgtcactggaaaaaaccagaaccagacagacagaaatgccttttactgcctggaatactttccatcccaaatgctaagaactggcaacaattttgaagtcagttaccaatttgaaaaagttcctttccattcaatgtacgcgcacagccagagcctggacagaatgatgaatcctttactggatcagtacctgtggcatctgcaatcgaccactaccggaaattcccttaatcaaggaacagctaccaccacgtacgggaaaattaccactggagactttgcctactacaggaaaaactggttgcctggagcctgcattaaacaacaaaaattttcaaagaatgccaatcaaaactacaagattcccgccagcgggggagacgcccttttaaagtatgacacgcataccactctaaatgggcgatggagtaacatggctcctggacctccaatggcaaccgcaggtgccggggactcggattttagcaacagccagctgatctttgccggacccaatccgagcggtaacacgaccacatcttcaaacaatttgttgtttacctcagaagaggagattgccacaacaaacccacgagacacggacatgtttggacagattgcagataataatcaaaatgccaccaccgcccctcacatcgctaacctggacgctatgggaattgttcccggaatggtctggcaaaacagagacatctactaccagggccctatttgggccaaggtccctcacacggacggacactttcacccttcgccgctgatgggaggatttggactgaaacacccgcctccacagattttcatcaaaaacacccccgtacccgccaatcccaatactacctttagcgctgcaaggattaattcttttctgacgcagtacagcaccggacaagttgccgttcagatcgactgggaaattcagaaggagcattccaaacgctggaatcccgaagttcaatttacttcaaactacggcactcaaaattctatgctgtgggctcccgacaatgctggcaactaccacgaactccgggctattgggtcccgtttcctcacccaccacttgtaa

SEQ ID NO: 1063 - protein, 736 aa, Artificial Sequence
  Synthetic polypeptide
MAADGYLPDWLEDNLSEGIREWWDLKPGAPKPKANQQKQDDGRGLVLPGYKYLGPFNGLDKGEPVNAADAAALEHDKAYDQQLKAGDNPYLRYNHADAEFQERLQEDTSFGGNLGRAVFQAKKRVLEPFGLVEEGAKTAPGKKRPVEQSPQEPDSSSGIGKTGQQPAKKRLNFGQTGDSESVPDPQPLGEPPATPAAVGPTTMASGGGAPMADNNEGADGVGNASGNWHCDSTWLGDRVITTSTRTWALPTYNNHLYKQISSASTGASNDNHYFGYSTPWGYFDFNRFHCHFSPRDWQRLINNNWGFRPKRLNFKLFNIQVKEVTTSDGVTTIANNLTSTVQVFSDSEYQLPYVLGSAHQGCLPPFPADVFMIPQYGYLTLNNGSQAVGRSSFYCLEYFPSQMLRTGNNFTFSYTFEEVPFHSSYAHSQSLDRLMNPLIDQYLYYLNRTQNQSGSAQNKDLLFSRGSPAGMSVQPKNWLPGPCYRQQRVSKTKTGNNNSNFTWTGASKYNLNGHESIINPGTAMASHKDDEDKFFPMSGVMIFGKESAGASNTALDNVMITDEEEIKATNPVATERFGTVAVNFQSSSTHPATGDVHVMGALPGMVWQDRDVYLQGPIWAKIPHTDGHFHPSPLMGGFGLKHPPPQILIKNTPVPANPPAEFSATKFASFITQYSTGQVSVEIEWELQKENSKRWNPEVQYTSNYAKSANVDFTVDNNGLYTEPRPIGTRYLTRPL

SEQ ID NO: 1064 - protein, 736 aa, Artificial Sequence; identical to SEQ ID NO: 1063
  Synthetic polypeptide

SEQ ID NO: 1065 - protein, 733 aa, Artificial Sequence
  Synthetic polypeptide
MTDGYLPDWLEDNLSEGVREWWALQPGAPKPKANQQHQDNARGLVLPGYKYLGPGNGLDKGEPVNAADAAALEHDKAYDQQLKAGDNPYLKYNHADAEFQERLQEDTSFGGNLGRAVFQAKKRILEPLGLVEEAAKTAPGKKRPVEQSPAEPDSSSGIGKSGQQPARKRLNFGQTGDTESVPDPQPLGQPPAAPSGVGSTTMASGGGAPMADNNEGADGVGNSSGNWHCDSQWLGDRVITTSTRTWALPTYNNHLYKQISSQSGATNDNHYFGYSTPWGYFDFNRFHCHFSPRDWQRLINNNWGFRPKRLNFKLFNIQVKEVTQNDGTTTIANNLTSTVQVFTDSEYQLPYVLGSAHQGCLPPFPADVFMVPQYGYLTLNNGSQAVGRSSFYCLEYFPSQMLRTGNNFQFSYTFEDVPFHSSYAHSQSLDRLMNPLIDQYLYYLNRTQTASGTQQSRLLFSQAGPTSMSLQAKNWLPGPCYRQQRLSKQANDNNNSNFPWTGATKYHLNGRDSLVNPGPAMASHKDDKEKFFPMHGTLIFGKEGTNANNADLENVMITDEEEIRTTNPVATEQYGTVSNNLQNSNAGPTTGTVNHQGALPGMVWQDRDVYLQGPIWAKIPHTDGHFHPSPLMGGFGLKHPPPQIMIKNTPVPANPPTNFSAAKFASFITQYSTGQVSVEIEWELQKENSKRWNPEIQYTSNYNKSVNVDFTVDTNGVYSEPRPIGTRYLTRNL

SEQ ID NO: 1066 - protein, 736 aa, Artificial Sequence; identical to SEQ ID NO: 762
  Synthetic polypeptide

SEQ ID NO: 1067 - protein, 736 aa, Artificial Sequence
  Synthetic polypeptide
MAADGYLPDWLEDNLSEGIRKWWDLKPGAPKPKANQQKQDDGRGLVLPGYKYLGPFNGLDKGEPVNAADAAALEHDKAYDQQLKAGDNPYLRYNHADAEFQERLQEDTSFGGNLGRAVFQAKKRVLEPFGLVEEGAKTAPGKKRPVEQSPQEPDSSSGIGKTGQQPAKKRLNFGQTGDSESVPDPQPLGEPPATPAAVGPTTMASGGGAPMADNNEGADGVGNASGNWHCDSTWLGDRVITTSTRTWALPTYNNHLYKQISSASTGASNDNHYFGYSTPWGYFDFNRFHCHFSPRDWQRLINNNWGFRPKRLNFKLFNIQVKEVTTNDGVTTIANNLTSTVQVFSDSEYQLPYVLGSAHQGCLPPFPADVFMIPQYGYLTLNNGSQAVGRSSFYCLEYFPSQMLRTGNNFTFSYTFEEVPFHSSYAHSQSLDRLMNPLIDQYLYYLNRTQNQSGSAQNKDLLFSRGSPAGMSVQPKNWLPGPCYRQQRVSKTKTDNNNSNFTWTGASKYNLNGRESIINPGTAMASHKDDKDKFFPMSGVMIFGKESAGASNTALDNVMITDEEEIKATNPVATERFGTVAVNFQSSSTDPATGDVHVMGALPGMVWQDRDVYLQGPIWAKIPHTDGHFHPSPLMGGFGLKHPPPQILIKNTPVPANPPAEFSATKFASFITQYSTGQVSVEIEWELQKENSKRWNPEVQYTSNYAKSANVDFTVDNNGLYTEPRPIGTRYLTRPL

SEQ ID NO: 1068 - protein, 736 aa, Artificial Sequence
  Synthetic polypeptide
MAADGYLPDWLEDNLSEGIREWWDLKPGAPKPKANQQKQDNGRGLVLPGYKYLGPFNGLDKGEPVNAADAAALEHDKAYDQQLKAGDNPYLRYNHADAEFQERLQEDTSFGGNLGRAVFQAKKRVLEPFGLVEEGAKTAPGKKRPVEQSPQEPDSSSGIGKTGQQPAKKRLNFGQTGDSESVPDPQPLGEPPATPAAVGPTTMASGGGAPMADNNEGADGVGNASGNWHCDSTWLGDRVITTSTRTWALPTYNNHLYKQISSASTGASNDNHYFGYSTPWGYFDFNRFHCHFSPRDWQRLINNNWGFRPKRLNFKLFNIQVKEVTTNDGVTTIANNLTSTVQVFSDSEYQLPYVLGSAHQGCLPPFPADVFMIPQYGYLTLNNGSQAVGRSSFYCLEYFPSQMLRTGNNFTFSYTFEEVPFHSSYAHSQSLDRLMNPLIDQYLYYLNRTQNQSGSAQNKDLLFSRGSPAGMSVQPKNWLPGPCYRQQRVSKTKTDNNNSNFTWTGASKYNLNGRESIINPGTAMASHKDDEDKFFPMSGVMIFGKESAGASNTALDNVMITDEEEIKATNPVATERFGTVAVNFQSSSTHPATGDVHVMGALPGMVWQDRDVYLQGPIWAKIPHTDGHFHPSPLMGGFGLKHPPPQILIKNTPVPANPPAEFSATKFASFITQYSTGQVSVEIEWELQKENSKRWNPEVQYTSNYAKSANVDFTVDNNGLYTEPRPIGTRYLTRPL

SEQ ID NO: 1069 - protein, 736 aa, Artificial Sequence
  Synthetic polypeptide
MAADGYLPDWLEDNLSEGIREWWDLKPGAPKPKANQQKQDDGRGLVLPGYKYLGPFNGLDKGEPVNAADAAALEHDKAYDQQLKAGDNPYLRYNHADAEFQERLQEDTSFGGNLGRAVFQAKKRVLEPFGLVEEGAKTAPGKKRPVEQSPQEPDSSSGIGKTGQQPAKKRLNFGQTGDSESVPDPQPLGEPPATPAAVGPTTMASGGGAPMADNNEGADGVGNASGNWHCDSTWLGDRVITTSTRTWALPTYNNHLYKQISSASTGASNDNHYFGYSTPWGYFDFNRFHCHFSPRDWQRLINNNWGFRPKRLNFKLFNIQVKEVTTNDGVTTIANNLTSTVQVFSDSEYQLPYVLGSAHQGCLPPFPADVFMIPQYGYLTLNNGSQAVGRSSFYCLEYFPSQMLRTGNNFTFSYTFEDVPFHSSYAHSQSLDRLMNPLIDQYLYYLNRTQNQSGSAQNKDLLFSRGSPAGMSVQLKNWLPGPCYRQQRVSKTKTDNNNSNFTWTGASKYNLNGRESIINPGTAMASHKDDEDKFFPMSGVMIFGKESAGASNTALDNVMITDEEEIKATNPVATERFGTVAVNFQSSSTDPATGDVHVMGALPGMVWQDRDVYLQGPIWAKIPHTDGHFHPSPLMGGFGLKHPPPQILIKNTPVPANPPAEFSATKFASFITQYSTGQVSVEIEWELQKENSKRWNPEVQYTSNYAKSANVDFTVDNNGLYTEPRPIGTRYLTRPL

SEQ ID NO: 1070 - protein, 736 aa, Artificial Sequence
  Synthetic polypeptide
MAADGYLPDWLEDNLSEGIREWWDLKPGAPKPKANQQKQDDGRGLVLPGYKYLGPFNGLDKGEPVNAADAAALEHDKAYDQQLKAGDNPYLRYNHADAEFQERLQEDTSFGGNLGRAVFQAKKRVLEPFGLVEEGAKTAPGKKRPVEQSPQEPDSSSGIGKSGQQPAKKRLNFGQTGDSESVPDPQPLGEPPATPAAVGPTTMASGGGAPMADNNEGADGVGNASGNWHCDSTWLGDRVITTSTRTWALPTYNNHLYKQISSASTGASNDNHYFGYSTPWGYFDFNRFHCHFSPRDWQRLINNNWGFRPKRLNFKLFNIQVKEVTTNDGVTTIANNLTSTVQVFSDSEYQLPYVLGSAHQGCLPPFPADVFMIPQYGYLTLNNGSQAVGRSSFYCLEYFPSQMLRTGNNFTFSYTFEDVPFHSSYAHSQSLDRLMNPLIDQYLYYLNRTQNQSGSAQNKDLLFSRGSPAGMSVQPKNWLPGPCYRQQRVSKTKTDNNNSNFTWTGASKYNLNGRESIINPGTAMASHKDDEDKFFPMSGVMIFGKGSAGASNTALDNVMITDEEEIKATNPVATERFGTVAVNFQSSSTDPATGDVHVMGALPGMVWQDRDVYLQGPIWAKIPHTDGHFHPSPLMGGFGLKHPPPQILIKNTPVPANPPAEFSATKFASFITQYSTGQVSVEIEWELQKENSKRWNPEVQYTSNYAKSANVDFTVDNNGLYTEPRPIGTRYLTRPL

SEQ ID NO: 1071 - protein, 736 aa, Artificial Sequence; identical to SEQ ID NO: 693
  Synthetic polypeptide

SEQ ID NO: 1072 - protein, 742 aa, Artificial Sequence
  Synthetic polypeptide
MAADGYLPDWLEDNLSEGIREWWALKPGAPQPKANQQHQDNGRGLVLPGYKYLGPFNGLDKGEPVNEADAAALEHDKAYDKQLEQGDNPYLKYNHADAEFQQRLATDTSFGGNLGRAVFQAKKRILEPLGLVEEGVKTAPGKKRPLEKTPNRPTNPDSGKAPAKKKQKDGEPADSARRTLDFEDSGAGDGPPEGSSSGEMSHDAEMRAAPGGNAVEAGQGADGVGNASGDWHCDSTWSEGRVTTTSTRTWVLPTYNNHLYLRIGTTANSNTYNGFSTPWGYFDFNRFHCHFSPRDWQRLINNNWGLRPKSMRVKIFNIQVKEVTTSNGETTVANNLTSTVQIFADSTYELPYVMDAGQEGSFPPFPNDVFMVPQYGYCGVVTGKNQNQTDRNAFYCLEYFPSQMLRTGNNFEVSYQFEKVPFHSMYAHSQSLDRMMNPLLDQYLWHLQSTTTGNSLNQGTATTTYGKITTGDFAYYRKNWLPGACIKQQKFSKNANQNYKIPASGGDALLKYDTHTTLNGRWSNMAPGPPMATAGAGDSDFSNSQLIFAGPNPSGNTTTSSNNLLFTSEEEIATTNPRDTDMFGQIADNNQNATTAPHIANLDAMGIVPGMVWQNRDIYYQGPIWAKVPHTDGHFHPSPLMGGFGLKHPPPQIFIKNTPVPANPNTTFSAARINSFLTQYSTGQVAVQIDWEIQKEHSKRWNPEVQFTSNYGTQNSMLWAPDNAGNYHELRAIGSRFLTHHL

SEQ ID NO: 1073 - DNA, 2211 bp, Artificial Sequence
  Synthetic polynucleotide
atggctgccgatggttatcttccagattggctcgaggacaacctctctgagggcattcgcgagtggtgggacttgaaacctggagccccgaagcccaaagccaaccagcaaaagcaggacgacggccggggtctggtgcttcctggctacaagtacctcggacccttcaacggactcgacaagggggagcccgtcaacgcggcggacgcagcggccctcgagcacgacaaggcctacgaccagcagctcaaagcgggtgacaatccgtacctgcggtataaccacgccgacgccgagtttcaggagcgtctgcaagaagatacgtcttttgggggcaacctcgggcgagcagtcttccaggccaagaagcgggttctcgaacctctcggtctggttgaggaaggcgctaaggcggctcctggaaagaaacgtccggtagagcagtcgccacaagagccagactcctcctcgggcatcggcaagacaggccagcagcccgctaaaaagagactcaattttggtcagactggcgactcagagtcagtccccgatccacaacctctcggagaacctccagcagccccctcaggtctgggacctaatacaatggcttcaggcggtggcgctccaatggcagacaataacgaaggcgccgacggagtgggtaattcctcgggaaattggcattgcgattccacatggctgggggacagagtcatcaccaccagcacccgaacctgggccctgcccacctacaacaaccacctctacaagcaaatctccaacggcacctcgggaggaagcaccaacgacaacacctattttggctacagcaccccctgggggtattttgacttcaacagattccactgtcacttttcaccacgtgactggcaacgactcatcaacaacaattggggattccggcccaaaagactcaacttcaagctgttcaacatccaggtcaaggaagtcacgacgaacgaaggcaccaagaccatcgccaataatctcaccagcaccgtgcaggtctttacggactcggagtaccagttaccgtacgtgctaggatccgctcaccagggatgtctgcctccgttcccggcggacgtcttcatggttcctcagtacggctatttaactttaaacaatggaagccaagccctgggacgttcctccttctactgtctggagtatttcccatcgcagatgctgagaaccggcaacaactttcagttcagctacaccttcgaggacgtgcctttccacagcagctacgcgcacagccagagcctggacaggctgatgaatcccctcatcgaccagtacctgtactacctggtcagaacgcaaacgactggaactggagggacgcagactctggcattcagccaagcgggtcctagctcaatggccaaccaggctagaaattgggtgcccggaccttgctaccggcagcagcgcgtctccacgacaaccaaccagaacaacaacagcaactttgcctggacgggagctgccaagtttaagctgaacggccgagactctctaatgaatccgggcgtggcaatggcttcccacaaggatgacgacgaccgcttcttcccttcgagcggggtcctgatttttggcaagcaaggagccgggaacgatggagtggattacagccaagtgctgattacagatgaggaagaaatcaaggctaccaaccccgtggccacagaagaatatggagcagtggccatcaacaaccaggccgccaatacgcaggcgcagaccggactcgtgcacaaccagggggtgattcccggcatggtgtggcagaatagagacgtgtacctgcagggtcccatctgggccaaaattcctcacacggacggcaactttcacccgtctcccctgatgggcggctttggactgaagcacccgcctcctcaaattctcatcaagaacacaccggttccagcggacccgccgcttaccttcaaccaggccaagctgaactctttcatcacgcagtacagcaccggacaggtcagcgtggaaatcgagtgggagctgcagaaagaaaacagcaaacgctggaatccagagattcaatacacttccaactactacaaatctacaaatgtggactttgctgtcaacacggagggggtttatagcgagcctcgccccattggcacccgttacctcacccgcaacctgtaa

SEQ ID NO: 1074 - DNA, 2592 bp, Artificial Sequence
  Synthetic polynucleotide
ctggctgccgatggttatcttccagattggctcgaggacaacctctctgagggcattcgcgagtggtgggacttgaaacctggagccccgaagcccaaagccaaccagcaaaagcaggacgacggccggggtctggtgcttcctggctacaagtacctcggacccttcaacggactcgacaagggggagcccgtcaacgcggcggacgcagcggccctcgagcacgacaaggcctacgaccagcagctcaaagcgggtgacaatccgtacctgcggtataaccacgccgacgccgagtttcaggagcgtctgcaagaagatacgtcttttgggggcaacctcgggcgagcagtcttccaggccaagaagcgggttctcgaacctctcggtctggttgaggaaggcgctaagatggaagtgcagctccaagccagtggtggcggactggtgcaggcaggaggcagcttgaggctcagctgtgccgccagcggcttcaagatcacccactacaccatgggctggttccggcaggcccctggcaaggagagggagttcgtgagcaggattacctggggtggtgacaacaccttctacagcaacagcgtgaagggcaggttcaccatcagcagggacaacgccaagaacaccgtgtacctgcagatgaacagcctgaagcccgaggacaccgccgactactactgtgcagccggcagtaccagcaccgctacccccctgagggtggactactggggcaaaggcactcaggtgacagtgtcttcaggagggggtggcagcgctcctggaaagaaacgtccggtagagcagtcgccacaagagccagactcctcctcgggcatcggcaagacaggccagcagcccgctaaaaagagactcaattttggtcagactggcgactcagagtcagtccccgatccacaacctctcggagaacctccagcagccccctcaggtctgggacctaatacaatggcttcaggcggtggcgctccaatggcagacaataacgaaggcgccgacggagtgggtaattcctcgggaaattggcattgcgattccacatggctgggggacagagtcatcaccaccagcacccgaacctgggccctgcccacctacaacaaccacctctacaagcaaatctccaacggcacctcgggaggaagcaccaacgacaacacctattttggctacagcaccccctgggggtattttgacttcaacagattccactgtcacttttcaccacgtgactggcaacgactcatcaacaacaattggggattccggcccaaaagactcaacttcaagctgttcaacatccaggtcaaggaagtcacgacgaacgaaggcaccaagaccatcgccaataatctcaccagcaccgtgcaggtctttacggactcggagtaccagttaccgtacgtgctaggatccgctcaccagggatgtctgcctccgttcccggcggacgtcttcatggttcctcagtacggctatttaactttaaacaatggaagccaagccctgggacgttcctccttctactgtctggagtatttcccatcgcagatgctgagaaccggcaacaactttcagttcagctacaccttcgaggacgtgcctttccacagcagctacgcgcacagccagagcctggacaggctgatgaatcccctcatcgaccagtacctgtactacctggtcagaacgcaaacgactggaactggagggacgcagactctggcattcagccaagcgggtcctagctcaatggccaaccaggctagaaattgggtgcccggaccttgctaccggcagcagcgcgtctccacgacaaccaaccagaacaacaacagcaactttgcctggacgggagctgccaagtttaagctgaacggccgagactctctaatgaatccgggcgtggcaatggcttcccacaaggatgacgacgaccgcttcttcccttcgagcggggtcctgatttttggcaagcaaggagccgggaacgatggagtggattacagccaagtgctgattacagatgaggaagaaatcaaggctaccaaccccgtggccacagaagaatatggagcagtggccatcaacaaccaggccgccaatacgcaggcgcagaccggactcgtgcacaaccagggggtgattcccggcatggtgtggcagaatagagacgtgtacctgcagggtcccatctgggccaaaattcctcacacggacggcaactttcacccgtctcccctgatgggcggctttggactgaagcacccgcctcctcaaattctcatcaagaacacaccggttccagcggacccgccgcttaccttcaaccaggccaagctgaactctttcatcacgcagtacagcaccggacaggtcagcgtggaaatcgagtgggagctgcagaaagaaaacagcaaacgctggaatccagagattcaatacacttccaactactacaaatctacaaatgtggactttgctgtcaacacggagggggtttatagcgagcctcgccccattggcacccgttacctcacccgcaacctgtaa

SEQ ID NO: 1075 - DNA, 2601 bp, Artificial Sequence
  Synthetic polynucleotide
ctggctgccgatggttatcttccagattggctcgaggacaacctctctgagggcattcgcgagtggtgggacttgaaacctggagccccgaagcccaaagccaaccagcaaaagcaggacgacggccggggtctggtgcttcctggctacaagtacctcggacccttcaacggactcgacaagggggagcccgtcaacgcggcggacgcagcggccctcgagcacgacaaggcctacgaccagcagctcaaagcgggtgacaatccgtacctgcggtataaccacgccgacgccgagtttcaggagcgtctgcaagaagatacgtcttttgggggcaacctcgggcgagcagtcttccaggccaagaagcgggttctcgaacctctcggtctggttgaggaaggcgctaagatggaggtgcagctgcaggcttctggaggaggactggtgcaggctggagggagtctgaggctgtcttgcagtgcctcagtgaggactttctccatctacgccatgggctggtttaggcaggctcccgggaaggagcgcgaattcgtggccggaatcaaccggtctggcgacgtgaccaagtacgctgatttcgtgaaaggccggtttagcatttccagagacaacgccaagaatatggtgtatctgcagatgaactccctgaaacctgaagacacagctctgtactattgtgccgctacttgggcctacgataccgtgggggctctgacatcaggatataatttttggggccaggggacccaggtgacagtgagctccggaggaggaggaagcgctcctggaaagaaacgtccggtagagcagtcgccacaagagccagactcctcctcgggcatcggcaagacaggccagcagcccgctaaaaagagactcaattttggtcagactggcgactcagagtcagtccccgatccacaacctctcggagaacctccagcagccccctcaggtctgggacctaatacaatggcttcaggcggtggcgctccaatggcagacaataacgaaggcgccgacggagtgggtaattcctcgggaaattggcattgcgattccacatggctgggggacagagtcatcaccaccagcacccgaacctgggccctgcccacctacaacaaccacctctacaagcaaatctccaacggcacctcgggaggaagcaccaacgacaacacctattttggctacagcaccccctgggggtattttgacttcaacagattccactgtcacttttcaccacgtgactggcaacgactcatcaacaacaattggggattccggcccaaaagactcaacttcaagctgttcaacatccaggtcaaggaagtcacgacgaacgaaggcaccaagaccatcgccaataatctcaccagcaccgtgcaggtctttacggactcggagtaccagttaccgtacgtgctaggatccgctcaccagggatgtctgcctccgttcccggcggacgtcttcatggttcctcagtacggctatttaactttaaacaatggaagccaagccctgggacgttcctccttctactgtctggagtatttcccatcgcagatgctgagaaccggcaacaactttcagttcagctacaccttcgaggacgtgcctttccacagcagctacgcgcacagccagagcctggacaggctgatgaatcccctcatcgaccagtacctgtactacctggtcagaacgcaaacgactggaactggagggacgcagactctggcattcagccaagcgggtcctagctcaatggccaaccaggctagaaattgggtgcccggaccttgctaccggcagcagcgcgtctccacgacaaccaaccagaacaacaacagcaactttgcctggacgggagctgccaagtttaagctgaacggccgagactctctaatgaatccgggcgtggcaatggcttcccacaaggatgacgacgaccgcttcttcccttcgagcggggtcctgatttttggcaagcaaggagccgggaacgatggagtggattacagccaagtgctgattacagatgaggaagaaatcaaggctaccaaccccgtggccacagaagaatatggagcagtggccatcaacaaccaggccgccaatacgcaggcgcagaccggactcgtgcacaaccagggggtgattcccggcatggtgtggcagaatagagacgtgtacctgcagggtcccatctgggccaaaattcctcacacggacggcaactttcacccgtctcccctgatgggcggctttggactgaagcacccgcctcctcaaattctcatcaagaacacaccggttccagcggacccgccgcttaccttcaaccaggccaagctgaactctttcatcacgcagtacagcaccggacaggtcagcgtggaaatcgagtgggagctgcagaaagaaaacagcaaacgctggaatccagagattcaatacacttccaactactacaaatctacaaatgtggactttgctgtcaacacggagggggtttatagcgagcctcgccccattggcacccgttacctcacccgcaacctgtaa

SEQ ID NO: 1076 - DNA, 2367 bp, Artificial Sequence
  Synthetic polynucleotide
ctggctgccgatggttatcttccagattggctcgaggacaacctctctgagggcattcgcgagtggtgggacttgaaacctggagccccgaagcccaaagccaaccagcaaaagcaggacgacggccggggtctggtgcttcctggctacaagtacctcggacccttcaacggactcgacaagggggagcccgtcaacgcggcggacgcagcggccctcgagcacgacaaggcctacgaccagcagctcaaagcgggtgacaatccgtacctgcggtataaccacgccgacgccgagtttcaggagcgtctgcaagaagatacgtcttttgggggcaacctcgggcgagcagtcttccaggccaagaagcgggttctcgaacctctcggtctggttgaggaaggcgctaagatgccaagcagtgtaatcgatgcgctgcagtacaagctggagggcaccacgaggctgaccaggaagaggggtctgaagctggccacggccctcagccttagcaataagttcgtagagggcagccccagcggcggcggcggcagcggcggcggcggcagcgctcctggaaagaaacgtccggtagagcagtcgccacaagagccagactcctcctcgggcatcggcaagacaggccagcagcccgctaaaaagagactcaattttggtcagactggcgactcagagtcagtccccgatccacaacctctcggagaacctccagcagccccctcaggtctgggacctaatacaatggcttcaggcggtggcgctccaatggcagacaataacgaaggcgccgacggagtgggtaattcctcgggaaattggcattgcgattccacatggctgggggacagagtcatcaccaccagcacccgaacctgggccctgcccacctacaacaaccacctctacaagcaaatctccaacggcacctcgggaggaagcaccaacgacaacacctattttggctacagcaccccctgggggtattttgacttcaacagattccactgtcacttttcaccacgtgactggcaacgactcatcaacaacaattggggattccggcccaaaagactcaacttcaagctgttcaacatccaggtcaaggaagtcacgacgaacgaaggcaccaagaccatcgccaataatctcaccagcaccgtgcaggtctttacggactcggagtaccagttaccgtacgtgctaggatccgctcaccagggatgtctgcctccgttcccggcggacgtcttcatggttcctcagtacggctatttaactttaaacaatggaagccaagccctgggacgttcctccttctactgtctggagtatttcccatcgcagatgctgagaaccggcaacaactttcagttcagctacaccttcgaggacgtgcctttccacagcagctacgcgcacagccagagcctggacaggctgatgaatcccctcatcgaccagtacctgtactacctggtcagaacgcaaacgactggaactggagggacgcagactctggcattcagccaagcgggtcctagctcaatggccaaccaggctagaaattgggtgcccggaccttgctaccggcagcagcgcgtctccacgacaaccaaccagaacaacaacagcaactttgcctggacgggagctgccaagtttaagctgaacggccgagactctctaatgaatccgggcgtggcaatggcttcccacaaggatgacgacgaccgcttcttcccttcgagcggggtcctgatttttggcaagcaaggagccgggaacgatggagtggattacagccaagtgctgattacagatgaggaagaaatcaaggctaccaaccccgtggccacagaagaatatggagcagtggccatcaacaaccaggccgccaatacgcaggcgcagaccggactcgtgcacaaccagggggtgattcccggcatggtgtggcagaatagagacgtgtacctgcagggtcccatctgggccaaaattcctcacacggacggcaactttcacccgtctcccctgatgggcggctttggactgaagcacccgcctcctcaaattctcatcaagaacacaccggttccagcggacccgccgcttaccttcaaccaggccaagctgaactctttcatcacgcagtacagcaccggacaggtcagcgtggaaatcgagtgggagctgcagaaagaaaacagcaaacgctggaatccagagattcaatacacttccaactactacaaatctacaaatgtggactttgctgtcaacacggagggggtttatagcgagcctcgccccattggcacccgttacctcacccgcaacctgtaa

SEQ ID NO: 1077 - DNA, 2328 bp, Artificial Sequence
  Synthetic polynucleotide
ctggctgccgatggttatcttccagattggctcgaggacaacctctctgagggcattcgcgagtggtgggacttgaaacctggagccccgaagcccaaagccaaccagcaaaagcaggacgacggccggggtctggtgcttcctggctacaagtacctcggacccttcaacggactcgacaagggggagcccgtcaacgcggcggacgcagcggccctcgagcacgacaaggcctacgaccagcagctcaaagcgggtgacaatccgtacctgcggtataaccacgccgacgccgagtttcaggagcgtctgcaagaagatacgtcttttgggggcaacctcgggcgagcagtcttccaggccaagaagcgggttctcgaacctctcggtctggttgaggaaggcgctaagatgtataccatctggatgcccgagaaccccaggcccggtaccccctgcgacatcttcaccaacagcaggggcaagcgagccagcaacggcggcggcggcggcagcggcggcggcggcagcgctcctggaaagaaacgtccggtagagcagtcgccacaagagccagactcctcctcgggcatcggcaagacaggccagcagcccgctaaaaagagactcaattttggtcagactggcgactcagagtcagtccccgatccacaacctctcggagaacctccagcagccccctcaggtctgggacctaatacaatggcttcaggcggtggcgctccaatggcagacaataacgaaggcgccgacggagtgggtaattcctcgggaaattggcattgcgattccacatggctgggggacagagtcatcaccaccagcacccgaacctgggccctgcccacctacaacaaccacctctacaagcaaatctccaacggcacctcgggaggaagcaccaacgacaacacctattttggctacagcaccccctgggggtattttgacttcaacagattccactgtcacttttcaccacgtgactggcaacgactcatcaacaacaattggggattccggcccaaaagactcaacttcaagctgttcaacatccaggtcaaggaagtcacgacgaacgaaggcaccaagaccatcgccaataatctcaccagcaccgtgcaggtctttacggactcggagtaccagttaccgtacgtgctaggatccgctcaccagggatgtctgcctccgttcccggcggacgtcttcatggttcctcagtacggctatttaactttaaacaatggaagccaagccctgggacgttcctccttctactgtctggagtatttcccatcgcagatgctgagaaccggcaacaactttcagttcagctacaccttcgaggacgtgcctttccacagcagctacgcgcacagccagagcctggacaggctgatgaatcccctcatcgaccagtacctgtactacctggtcagaacgcaaacgactggaactggagggacgcagactctggcattcagccaagcgggtcctagctcaatggccaaccaggctagaaattgggtgcccggaccttgctaccggcagcagcgcgtctccacgacaaccaaccagaacaacaacagcaactttgcctggacgggagctgccaagtttaagctgaacggccgagactctctaatgaatccgggcgtggcaatggcttcccacaaggatgacgacgaccgcttcttcccttcgagcggggtcctgatttttggcaagcaaggagccgggaacgatggagtggattacagccaagtgctgattacagatgaggaagaaatcaaggctaccaaccccgtggccacagaagaatatggagcagtggccatcaacaaccaggccgccaatacgcaggcgcagaccggactcgtgcacaaccagggggtgattcccggcatggtgtggcagaatagagacgtgtacctgcagggtcccatctgggccaaaattcctcacacggacggcaactttcacccgtctcccctgatgggcggctttggactgaagcacccgcctcctcaaattctcatcaagaacacaccggttccagcggacccgccgcttaccttcaaccaggccaagctgaactctttcatcacgcagtacagcaccggacaggtcagcgtggaaatcgagtgggagctgcagaaagaaaacagcaaacgctggaatccagagattcaatacacttccaactactacaaatctacaaatgtggactttgctgtcaacacggagggggtttatagcgagcctcgccccattggcacccgttacctcacccgcaacctgtaa

SEQ ID NO: 1078 - DNA, 2298 bp, Artificial Sequence
  Synthetic polynucleotide
ctggctgccgatggttatcttccagattggctcgaggacaacctctctgagggcattcgcgagtggtgggacttgaaacctggagccccgaagcccaaagccaaccagcaaaagcaggacgacggccggggtctggtgcttcctggctacaagtacctcggacccttcaacggactcgacaagggggagcccgtcaacgcggcggacgcagcggccctcgagcacgacaaggcctacgaccagcagctcaaagcgggtgacaatccgtacctgcggtataaccacgccgacgccgagtttcaggagcgtctgcaagaagatacgtcttttgggggcaacctcgggcgagcagtcttccaggccaagaagcgggttctcgaacctctcggtctggttgaggaaggcgctaagatgaccttcttctacggcggcagcaggggcaagaggaacaacttcaagaccgaggagtacggcggcggcggcagcggcggcggcggcagcgctcctggaaagaaacgtccggtagagcagtcgccacaagagccagactcctcctcgggcatcggcaagacaggccagcagcccgctaaaaagagactcaattttggtcagactggcgactcagagtcagtccccgatccacaacctctcggagaacctccagcagccccctcaggtctgggacctaatacaatggcttcaggcggtggcgctccaatggcagacaataacgaaggcgccgacggagtgggtaattcctcgggaaattggcattgcgattccacatggctgggggacagagtcatcaccaccagcacccgaacctgggccctgcccacctacaacaaccacctctacaagcaaatctccaacggcacctcgggaggaagcaccaacgacaacacctattttggctacagcaccccctgggggtattttgacttcaacagattccactgtcacttttcaccacgtgactggcaacgactcatcaacaacaattggggattccggcccaaaagactcaacttcaagctgttcaacatccaggtcaaggaagtcacgacgaacgaaggcaccaagaccatcgccaataatctcaccagcaccgtgcaggtctttacggactcggagtaccagttaccgtacgtgctaggatccgctcaccagggatgtctgcctccgttcccggcggacgtcttcatggttcctcagtacggctatttaactttaaacaatggaagccaagccctgggacgttcctccttctactgtctggagtatttcccatcgcagatgctgagaaccggcaacaactttcagttcagctacaccttcgaggacgtgcctttccacagcagctacgcgcacagccagagcctggacaggctgatgaatcccctcatcgaccagtacctgtactacctggtcagaacgcaaacgactggaactggagggacgcagactctggcattcagccaagcgggtcctagctcaatggccaaccaggctagaaattgggtgcccggaccttgctaccggcagcagcgcgtctccacgacaaccaaccagaacaacaacagcaactttgcctggacgggagctgccaagtttaagctgaacggccgagactctctaatgaatccgggcgtggcaatggcttcccacaaggatgacgacgaccgcttcttcccttcgagcggggtcctgatttttggcaagcaaggagccgggaacgatggagtggattacagccaagtgctgattacagatgaggaagaaatcaaggctaccaaccccgtggccacagaagaatatggagcagtggccatcaacaaccaggccgccaatacgcaggcgcagaccggactcgtgcacaaccagggggtgattcccggcatggtgtggcagaatagagacgtgtacctgcagggtcccatctgggccaaaattcctcacacggacggcaactttcacccgtctcccctgatgggcggctttggactgaagcacccgcctcctcaaattctcatcaagaacacaccggttccagcggacccgccgcttaccttcaaccaggccaagctgaactctttcatcacgcagtacagcaccggacaggtcagcgtggaaatcgagtgggagctgcagaaagaaaacagcaaacgctggaatccagagattcaatacacttccaactactacaaatctacaaatgtggactttgctgtcaacacggagggggtttatagcgagcctcgccccattggcacccgttacctcacccgcaacctgtaa

SEQ ID NO: 1079 - DNA, 2211 bp, Artificial Sequence
  Synthetic polynucleotide
atggctgccgatggttatcttccagattggctcgaggacaaccttagtgaaggaattcgcgagtggtgggctttgaaacctggagcccctcaacccaaggcaaatcaacaacatcaagacaacgctcgaggtcttgtgcttccgggttacaaataccttggacccggcaacggactcgacaagggggagccggtcaacgcagcagacgcggcggccctcgagcacgacaaggcctacgaccagcagctcaaggccggagacaacccgtacctcaagtacaaccacgccgacgccgagttccaggagcggctcaaagaagatacgtcttttgggggcaacctcgggcgagcagtcttccaggccaaaaagaggcttcttgaacctcttggtctggttgaggaagcggctaaggcggctcctggaaagaagaggcctgtagagcagtctcctcaggaaccggactcctccgcgggtattggcaaatcgggtgcacagcccgctaaaaagagactcaatttcggtcagactggcgacacagagtcagtcccagaccctcaaccaatcggagaacctcccgcagccccctcaggtgtgggatctcttacaatggcttcaggtggtggcgcaccagtggcagacaataacgaaggtgccgatggagtgggtagttcctcgggaaattggcattgcgattcccaatggctgggggacagagtcatcaccaccagcacccgaacctgggccctgcccacctacaacaatcacctctacaagcaaatctccaacagcacatctggaggatcttcaaatgacaacgcctacttcggctacagcaccccctgggggtattttgacttcaacagattccactgccacttctcaccacgtgactggcagcgactcatcaacaacaactggggattccggcctaagcgactcaacttcaagctcttcaacattcaggtcaaagaggttacggacaacaatggagtcaagaccatcgccaataaccttaccagcacggtccaggtcttcacggactcagactatcagctcccgtacgtgctcgggtcggctcacgagggctgcctcccgccgttcccagcggacgttttcatgattcctcagtacgggtatctgacgcttaatgatggaagccaggccgtgggtcgttcgtccttttactgcctggaatatttcccgtcgcaaatgctaagaacgggtaacaacttccagttcaactacgagtttgagaacgtacctttccatagcagctacgctcacagccaaagcctggaccgactaatgaatccactcatcgaccaatacttgtactatctctcaaagactattaacgattctggacagaatcaacaaacgctaaaattcagtgtggccggacccagcaacatggctgtccagggaagaaactacatacctggacccagctaccgacaacaacgtgtctcaaccactgtgactcaaaacaacaacagcgaatttgcttggcctggagcttcttcttgggctctcaatggacgtaatagcttgatgaatcctggacctgctatggccagccacaaagaaggagaggaccgtttctttcctttgtctggatctttaatttttggcaaacaaggaactggaagagacaacgtggatgcggacgaagtcatgataaccaacgaagaagaaattaaaactactaacccggtagcaacggagtcctatggacaagtggccataaaccaccagagtgcccaagcacaggcgcagaccggctgggttcaaaaccaaggaatacttccgggtatggtttggcaggacagagatgtgtacctgcaaggacccatttgggccaaaattcctcacacggacggcaactttcacccttctccgctgatgggagggtttggaatgaagcacccgcctcctcagatcctcatcaaaaacacacctgtacctgcggatcctccaacggccttcaacaaggacaagctgaactctttcatcacccagtattctactggccaagtcagcgtggagatcgagtgggagctgcagaaggaaaacagcaagcgctggaacccggagatccagtacacttccaactattacaagtctaataatgttgaatttgctgttaatactgaaggtgtatatagtgaaccccgccccattggcaccagatacctgactcgtaatctgtaa

SEQ ID NO: 1080 - DNA, 2277 bp, Artificial Sequence
  Synthetic polynucleotide
ctggctgccgatggttatcttccagattggctcgaggacaaccttagtgaaggaattcgcgagtggtgggctttgaaacctggagcccctcaacccaaggcaaatcaacaacatcaagacaacgctcgaggtcttgtgcttccgggttacaaataccttggacccggcaacggactcgacaagggggagccggtcaacgcagcagacgcggcggccctcgagcacgacaaggcctacgaccagcagctcaaggccggagacaacccgtacctcaagtacaaccacgccgacgccgagttccaggagcggctcaaagaagatacgtcttttgggggcaacctcgggcgagcagtcttccaggccaaaaagaggcttcttgaacctcttggtctggttgaggaagcggctaagatgaacaaccagaagatcgtgaacctgaaggagaaggtggcccagctggaggccggcggcggcggcagcgctcctggaaagaagaggcctgtagagcagtctcctcaggaaccggactcctccgcgggtattggcaaatcgggtgcacagcccgctaaaaagagactcaatttcggtcagactggcgacacagagtcagtcccagaccctcaaccaatcggagaacctcccgcagccccctcaggtgtgggatctcttacaatggcttcaggtggtggcgcaccagtggcagacaataacgaaggtgccgatggagtgggtagttcctcgggaaattggcattgcgattcccaatggctgggggacagagtcatcaccaccagcacccgaacctgggccctgcccacctacaacaatcacctctacaagcaaatctccaacagcacatctggaggatcttcaaatgacaacgcctacttcggctacagcaccccctgggggtattttgacttcaacagattccactgccacttctcaccacgtgactggcagcgactcatcaacaacaactggggattccggcctaagcgactcaacttcaagctcttcaacattcaggtcaaagaggttacggacaacaatggagtcaagaccatcgccaataaccttaccagcacggtccaggtcttcacggactcagactatcagctcccgtacgtgctcgggtcggctcacgagggctgcctcccgccgttcccagcggacgttttcatgattcctcagtacgggtatctgacgcttaatgatggaagccaggccgtgggtcgttcgtccttttactgcctggaatatttcccgtcgcaaatgctaagaacgggtaacaacttccagttcaactacgagtttgagaacgtacctttccatagcagctacgctcacagccaaagcctggaccgactaatgaatccactcatcgaccaatacttgtactatctctcaaagactattaacgattctggacagaatcaacaaacgctaaaattcagtgtggccggacccagcaacatggctgtccagggaagaaactacatacctggacccagctaccgacaacaacgtgtctcaaccactgtgactcaaaacaacaacagcgaatttgcttggcctggagcttcttcttgggctctcaatggacgtaatagcttgatgaatcctggacctgctatggccagccacaaagaaggagaggaccgtttctttcctttgtctggatctttaatttttggcaaacaaggaactggaagagacaacgtggatgcggacgaagtcatgataaccaacgaagaagaaattaaaactactaacccggtagcaacggagtcctatggacaagtggccataaaccaccagagtgcccaagcacaggcgcagaccggctgggttcaaaaccaaggaatacttccgggtatggtttggcaggacagagatgtgtacctgcaaggacccatttgggccaaaattcctcacacggacggcaactttcacccttctccgctgatgggagggtttggaatgaagcacccgcctcctcagatcctcatcaaaaacacacctgtacctgcggatcctccaacggccttcaacaaggacaagctgaactctttcatcacccagtattctactggccaagtcagcgtggagatcgagtgggagctgcagaaggaaaacagcaagcgctggaacccggagatccagtacacttccaactattacaagtctaataatgttgaatttgctgttaatactgaaggtgtatatagtgaaccccgccccattggcaccagatacctgactcgtaatctgtaa

SEQ ID NO: 1081 - DNA, 2313 bp, Artificial Sequence
  Synthetic polynucleotide
ctggctgccgatggttatcttccagattggctcgaggacaaccttagtgaaggaattcgcgagtggtgggctttgaaacctggagcccctcaacccaaggcaaatcaacaacatcaagacaacgctcgaggtcttgtgcttccgggttacaaataccttggacccggcaacggactcgacaagggggagccggtcaacgcagcagacgcggcggccctcgagcacgacaaggcctacgaccagcagctcaaggccggagacaacccgtacctcaagtacaaccacgccgacgccgagttccaggagcggctcaaagaagatacgtcttttgggggcaacctcgggcgagcagtcttccaggccaaaaagaggcttcttgaacctcttggtctggttgaggaagcggctaagatgtataccatctggatgcccgagaaccccaggcccggtaccccctgcgacatcttcaccaacagcaggggcaagcgagccagcaacggcggcggcggcggcagcgctcctggaaagaagaggcctgtagagcagtctcctcaggaaccggactcctccgcgggtattggcaaatcgggtgcacagcccgctaaaaagagactcaatttcggtcagactggcgacacagagtcagtcccagaccctcaaccaatcggagaacctcccgcagccccctcaggtgtgggatctcttacaatggcttcaggtggtggcgcaccagtggcagacaataacgaaggtgccgatggagtgggtagttcctcgggaaattggcattgcgattcccaatggctgggggacagagtcatcaccaccagcacccgaacctgggccctgcccacctacaacaatcacctctacaagcaaatctccaacagcacatctggaggatcttcaaatgacaacgcctacttcggctacagcaccccctgggggtattttgacttcaacagattccactgccacttctcaccacgtgactggcagcgactcatcaacaacaactggggattccggcctaagcgactcaacttcaagctcttcaacattcaggtcaaagaggttacggacaacaatggagtcaagaccatcgccaataaccttaccagcacggtccaggtcttcacggactcagactatcagctcccgtacgtgctcgggtcggctcacgagggctgcctcccgccgttcccagcggacgttttcatgattcctcagtacgggtatctgacgcttaatgatggaagccaggccgtgggtcgttcgtccttttactgcctggaatatttcccgtcgcaaatgctaagaacgggtaacaacttccagttcaactacgagtttgagaacgtacctttccatagcagctacgctcacagccaaagcctggaccgactaatgaatccactcatcgaccaatacttgtactatctctcaaagactattaacgattctggacagaatcaacaaacgctaaaattcagtgtggccggacccagcaacatggctgtccagggaagaaactacatacctggacccagctaccgacaacaacgtgtctcaaccactgtgactcaaaacaacaacagcgaatttgcttggcctggagcttcttcttgggctctcaatggacgtaatagcttgatgaatcctggacctgctatggccagccacaaagaaggagaggaccgtttctttcctttgtctggatctttaatttttggcaaacaaggaactggaagagacaacgtggatgcggacgaagtcatgataaccaacgaagaagaaattaaaactactaacccggtagcaacggagtcctatggacaagtggccataaaccaccagagtgcccaagcacaggcgcagaccggctgggttcaaaaccaaggaatacttccgggtatggtttggcaggacagagatgtgtacctgcaaggacccatttgggccaaaattcctcacacggacggcaactttcacccttctccgctgatgggagggtttggaatgaagcacccgcctcctcagatcctcatcaaaaacacacctgtacctgcggatcctccaacggccttcaacaaggacaagctgaactctttcatcacccagtattctactggccaagtcagcgtggagatcgagtgggagctgcagaaggaaaacagcaagcgctggaacccggagatccagtacacttccaactattacaagtctaataatgttgaatttgctgttaatactgaaggtgtatatagtgaaccccgccccattggcaccagatacctgactcgtaatctgtaa

SEQ ID NO: 1082 - DNA, 2283 bp, Artificial Sequence
  Synthetic polynucleotide
ctggctgccgatggttatcttccagattggctcgaggacaaccttagtgaaggaattcgcgagtggtgggctttgaaacctggagcccctcaacccaaggcaaatcaacaacatcaagacaacgctcgaggtcttgtgcttccgggttacaaataccttggacccggcaacggactcgacaagggggagccggtcaacgcagcagacgcggcggccctcgagcacgacaaggcctacgaccagcagctcaaggccggagacaacccgtacctcaagtacaaccacgccgacgccgagttccaggagcggctcaaagaagatacgtcttttgggggcaacctcgggcgagcagtcttccaggccaaaaagaggcttcttgaacctcttggtctggttgaggaagcggctaagatgaccttcttctacggcggcagcaggggcaagaggaacaacttcaagaccgaggagtacggcggcggcggcagcgctcctggaaagaagaggcctgtagagcagtctcctcaggaaccggactcctccgcgggtattggcaaatcgggtgcacagcccgctaaaaagagactcaatttcggtcagactggcgacacagagtcagtcccagaccctcaaccaatcggagaacctcccgcagccccctcaggtgtgggatctcttacaatggcttcaggtggtggcgcaccagtggcagacaataacgaaggtgccgatggagtgggtagttcctcgggaaattggcattgcgattcccaatggctgggggacagagtcatcaccaccagcacccgaacctgggccctgcccacctacaacaatcacctctacaagcaaatctccaacagcacatctggaggatcttcaaatgacaacgcctacttcggctacagcaccccctgggggtattttgacttcaacagattccactgccacttctcaccacgtgactggcagcgactcatcaacaacaactggggattccggcctaagcgactcaacttcaagctcttcaacattcaggtcaaagaggttacggacaacaatggagtcaagaccatcgccaataaccttaccagcacggtccaggtcttcacggactcagactatcagctcccgtacgtgctcgggtcggctcacgagggctgcctcccgccgttcccagcggacgttttcatgattcctcagtacgggtatctgacgcttaatgatggaagccaggccgtgggtcgttcgtccttttactgcctggaatatttcccgtcgcaaatgctaagaacgggtaacaacttccagttcaactacgagtttgagaacgtacctttccatagcagctacgctcacagccaaagcctggaccgactaatgaatccactcatcgaccaatacttgtactatctctcaaagactattaacgattctggacagaatcaacaaacgctaaaattcagtgtggccggacccagcaacatggctgtccagggaagaaactacatacctggacccagctaccgacaacaacgtgtctcaaccactgtgactcaaaacaacaacagcgaatttgcttggcctggagcttcttcttgggctctcaatggacgtaatagcttgatgaatcctggacctgctatggccagccacaaagaaggagaggaccgtttctttcctttgtctggatctttaatttttggcaaacaaggaactggaagagacaacgtggatgcggacgaagtcatgataaccaacgaagaagaaattaaaactactaacccggtagcaacggagtcctatggacaagtggccataaaccaccagagtgcccaagcacaggcgcagaccggctgggttcaaaaccaaggaatacttccgggtatggtttggcaggacagagatgtgtacctgcaaggacccatttgggccaaaattcctcacacggacggcaactttcacccttctccgctgatgggagggtttggaatgaagcacccgcctcctcagatcctcatcaaaaacacacctgtacctgcggatcctccaacggccttcaacaaggacaagctgaactctttcatcacccagtattctactggccaagtcagcgtggagatcgagtgggagctgcagaaggaaaacagcaagcgctggaacccggagatccagtacacttccaactattacaagtctaataatgttgaatttgctgttaatactgaaggtgtatatagtgaaccccgccccattggcaccagatacctgactcgtaatctgtaa

SEQ ID NO: 1083 - DNA, 2283 bp, Artificial Sequence
  Synthetic polynucleotide
ctggctgccgatggttatcttccagattggctcgaggacaaccttagtgaaggaattcgcgagtggtgggctttgaaacctggagcccctcaacccaaggcaaatcaacaacatcaagacaacgctcgaggtcttgtgcttccgggttacaaataccttggacccggcaacggactcgacaagggggagccggtcaacgcagcagacgcggcggccctcgagcacgacaaggcctacgaccagcagctcaaggccggagacaacccgtacctcaagtacaaccacgccgacgccgagttccaggagcggctcaaagaagatacgtcttttgggggcaacctcgggcgagcagtcttccaggccaaaaagaggcttcttgaacctcttggtctggttgaggaagcggctaagatggcagctgcggccgccgcggctgcagcggctgcagccgccgcagctgcggctgcagcgggcggcggcggcagcgctcctggaaagaagaggcctgtagagcagtctcctcaggaaccggactcctccgcgggtattggcaaatcgggtgcacagcccgctaaaaagagactcaatttcggtcagactggcgacacagagtcagtcccagaccctcaaccaatcggagaacctcccgcagccccctcaggtgtgggatctcttacaatggcttcaggtggtggcgcaccagtggcagacaataacgaaggtgccgatggagtgggtagttcctcgggaaattggcattgcgattcccaatggctgggggacagagtcatcaccaccagcacccgaacctgggccctgcccacctacaacaatcacctctacaagcaaatctccaacagcacatctggaggatcttcaaatgacaacgcctacttcggctacagcaccccctgggggtattttgacttcaacagattccactgccacttctcaccacgtgactggcagcgactcatcaacaacaactggggattccggcctaagcgactcaacttcaagctcttcaacattcaggtcaaagaggttacggacaacaatggagtcaagaccatcgccaataaccttaccagcacggtccaggtcttcacggactcagactatcagctcccgtacgtgctcgggtcggctcacgagggctgcctcccgccgttcccagcggacgttttcatgattcctcagtacgggtatctgacgcttaatgatggaagccaggccgtgggtcgttcgtccttttactgcctggaatatttcccgtcgcaaatgctaagaacgggtaacaacttccagttcaactacgagtttgagaacgtacctttccatagcagctacgctcacagccaaagcctggaccgactaatgaatccactcatcgaccaatacttgtactatctctcaaagactattaacgattctggacagaatcaacaaacgctaaaattcagtgtggccggacccagcaacatggctgtccagggaagaaactacatacctggacccagctaccgacaacaacgtgtctcaaccactgtgactcaaaacaacaacagcgaatttgcttggcctggagcttcttcttgggctctcaatggacgtaatagcttgatgaatcctggacctgctatggccagccacaaagaaggagaggaccgtttctttcctttgtctggatctttaatttttggcaaacaaggaactggaagagacaacgtggatgcggacgaagtcatgataaccaacgaagaagaaattaaaactactaacccggtagcaacggagtcctatggacaagtggccataaaccaccagagtgcccaagcacaggcgcagaccggctgggttcaaaaccaaggaatacttccgggtatggtttggcaggacagagatgtgtacctgcaaggacccatttgggccaaaattcctcacacggacggcaactttcacccttctccgctgatgggagggtttggaatgaagcacccgcctcctcagatcctcatcaaaaacacacctgtacctgcggatcctccaacggccttcaacaaggacaagctgaactctttcatcacccagtattctactggccaagtcagcgtggagatcgagtgggagctgcagaaggaaaacagcaagcgctggaacccggagatccagtacacttccaactattacaagtctaataatgttgaatttgctgttaatactgaaggtgtatatagtgaaccccgccccattggcaccagatacctgactcgtaatctgtaa

SEQ ID NO: 1084 - protein, 726 aa, Artificial Sequence
  Synthetic polypeptide
MEVQLQASGGGLVQAGGSLRLSCAASGFKITHYTMGWFRQAPGKEREFVSRITWGGDNTFYSNSVKGRFTISRDNAKNTVYLQMNSLKPEDTADYYCAAGSTSTATPLRVDYWGKGTQVTVSSGGGGSAPGKKRPVEQSPQEPDSSSGIGKTGQQPAKKRLNFGQTGDSESVPDPQPLGEPPAAPSGLGPNTMASGGGAPMADNNEGADGVGNSSGNWHCDSTWLGDRVITTSTRTWALPTYNNHLYKQISNGTSGGSTNDNTYFGYSTPWGYFDFNRFHCHFSPRDWQRLINNNWGFRPKRLNFKLFNIQVKEVTTNEGTKTIANNLTSTVQVFTDSEYQLPYVLGSAHQGCLPPFPADVFMVPQYGYLTLNNGSQALGRSSFYCLEYFPSQMLRTGNNFQFSYTFEDVPFHSSYAHSQSLDRLMNPLIDQYLYYLVRTQTTGTGGTQTLAFSQAGPSSMANQARNWVPGPCYRQQRVSTTTNQNNNSNFAWTGAAKFKLNGRDSLMNPGVAMASHKDDDDRFFPSSGVLIFGKQGAGNDGVDYSQVLITDEEEIKATNPVATEEYGAVAINNQAANTQAQTGLVHNQGVIPGMVWQNRDVYLQGPIWAKIPHTDGNFHPSPLMGGFGLKHPPPQILIKNTPVPADPPLTFNQAKLNSFITQYSTGQVSVEIEWELQKENSKRWNPEIQYTSNYYKSTNVDFAVNTEGVYSEPRPIGTRYLTRNL

SEQ ID NO: 1085 - protein, 729 aa, Artificial Sequence
  Synthetic polypeptide
MEVQLQASGGGLVQAGGSLRLSCSASVRTFSIYAMGWFRQAPGKEREFVAGINRSGDVTKYADFVKGRFSISRDNAKNMVYLQMNSLKPEDTALYYCAATWAYDTVGALTSGYNFWGQGTQVTVSSGGGGSAPGKKRPVEQSPQEPDSSSGIGKTGQQPAKKRLNFGQTGDSESVPDPQPLGEPPAAPSGLGPNTMASGGGAPMADNNEGADGVGNSSGNWHCDSTWLGDRVITTSTRTWALPTYNNHLYKQISNGTSGGSTNDNTYFGYSTPWGYFDFNRFHCHFSPRDWQRLINNNWGFRPKRLNFKLFNIQVKEVTTNEGTKTIANNLTSTVQVFTDSEYQLPYVLGSAHQGCLPPFPADVFMVPQYGYLTLNNGSQALGRSSFYCLEYFPSQMLRTGNNFQFSYTFEDVPFHSSYAHSQSLDRLMNPLIDQYLYYLVRTQTTGTGGTQTLAFSQAGPSSMANQARNWVPGPCYRQQRVSTTTNQNNNSNFAWTGAAKFKLNGRDSLMNPGVAMASHKDDDDRFFPSSGVLIFGKQGAGNDGVDYSQVLITDEEEIKATNPVATEEYGAVAINNQAANTQAQTGLVHNQGVIPGMVWQNRDVYLQGPIWAKIPHTDGNFHPSPLMGGFGLKHPPPQILIKNTPVPADPPLTFNQAKLNSFITQYSTGQVSVEIEWELQKENSKRWNPEIQYTSNYYKSTNVDFAVNTEGVYSEPRPIGTRYLTRNL

SEQ ID NO: 1086 - protein, 651 aa, Artificial Sequence
  Synthetic polypeptide
MPSSVIDALQYKLEGTTRLTRKRGLKLATALSLSNKFVEGSPSGGGGSGGGGSAPGKKRPVEQSPQEPDSSSGIGKTGQQPAKKRLNFGQTGDSESVPDPQPLGEPPAAPSGLGPNTMASGGGAPMADNNEGADGVGNSSGNWHCDSTWLGDRVITTSTRTWALPTYNNHLYKQISNGTSGGSTNDNTYFGYSTPWGYFDFNRFHCHFSPRDWQRLINNNWGFRPKRLNFKLFNIQVKEVTTNEGTKTIANNLTSTVQVFTDSEYQLPYVLGSAHQGCLPPFPADVFMVPQYGYLTLNNGSQALGRSSFYCLEYFPSQMLRTGNNFQFSYTFEDVPFHSSYAHSQSLDRLMNPLIDQYLYYLVRTQTTGTGGTQTLAFSQAGPSSMANQARNWVPGPCYRQQRVSTTTNQNNNSNFAWTGAAKFKLNGRDSLMNPGVAMASHKDDDDRFFPSSGVLIFGKQGAGNDGVDYSQVLITDEEEIKATNPVATEEYGAVAINNQAANTQAQTGLVHNQGVIPGMVWQNRDVYLQGPIWAKIPHTDGNFHPSPLMGGFGLKHPPPQILIKNTPVPADPPLTFNQAKLNSFITQYSTGQVSVEIEWELQKENSKRWNPEIQYTSNYYKSTNVDFAVNTEGVYSEPRPIGTRYLTRNL

SEQ ID NO: 1087 - protein, 638 aa, Artificial Sequence
  Synthetic polypeptide
MYTIWMPENPRPGTPCDIFTNSRGKRASNGGGGGSGGGGSAPGKKRPVEQSPQEPDSSSGIGKTGQQPAKKRLNFGQTGDSESVPDPQPLGEPPAAPSGLGPNTMASGGGAPMADNNEGADGVGNSSGNWHCDSTWLGDRVITTSTRTWALPTYNNHLYKQISNGTSGGSTNDNTYFGYSTPWGYFDFNRFHCHFSPRDWQRLINNNWGFRPKRLNFKLFNIQVKEVTTNEGTKTIANNLTSTVQVFTDSEYQLPYVLGSAHQGCLPPFPADVFMVPQYGYLTLNNGSQALGRSSFYCLEYFPSQMLRTGNNFQFSYTFEDVPFHSSYAHSQSLDRLMNPLIDQYLYYLVRTQTTGTGGTQTLAFSQAGPSSMANQARNWVPGPCYRQQRVSTTTNQNNNSNFAWTGAAKFKLNGRDSLMNPGVAMASHKDDDDRFFPSSGVLIFGKQGAGNDGVDYSQVLITDEEEIKATNPVATEEYGAVAINNQAANTQAQTGLVHNQGVIPGMVWQNRDVYLQGPIWAKIPHTDGNFHPSPLMGGFGLKHPPPQILIKNTPVPADPPLTFNQAKLNSFITQYSTGQVSVEIEWELQKENSKRWNPEIQYTSNYYKSTNVDFAVNTEGVYSEPRPIGTRYLTRNL

SEQ ID NO: 1088 - protein, 628 aa, Artificial Sequence
  Synthetic polypeptide
MTFFYGGSRGKRNNFKTEEYGGGGSGGGGSAPGKKRPVEQSPQEPDSSSGIGKTGQQPAKKRLNFGQTGDSESVPDPQPLGEPPAAPSGLGPNTMASGGGAPMADNNEGADGVGNSSGNWHCDSTWLGDRVITTSTRTWALPTYNNHLYKQISNGTSGGSTNDNTYFGYSTPWGYFDFNRFHCHFSPRDWQRLINNNWGFRPKRLNFKLFNIQVKEVTTNEGTKTIANNLTSTVQVFTDSEYQLPYVLGSAHQGCLPPFPADVFMVPQYGYLTLNNGSQALGRSSFYCLEYFPSQMLRTGNNFQFSYTFEDVPFHSSYAHSQSLDRLMNPLIDQYLYYLVRTQTTGTGGTQTLAFSQAGPSSMANQARNWVPGPCYRQQRVSTTTNQNNNSNFAWTGAAKFKLNGRDSLMNPGVAMASHKDDDDRFFPSSGVLIFGKQGAGNDGVDYSQVLITDEEEIKATNPVATEEYGAVAINNQAANTQAQTGLVHNQGVIPGMVWQNRDVYLQGPIWAKIPHTDGNFHPSPLMGGFGLKHPPPQILIKNTPVPADPPLTFNQAKLNSFITQYSTGQVSVEIEWELQKENSKRWNPEIQYTSNYYKSTNVDFAVNTEGVYSEPRPIGTRYLTRNL

SEQ ID NO: 1089 - protein, 621 aa, Artificial Sequence
  Synthetic polypeptide
MNNQKIVNLKEKVAQLEAGGGGSAPGKKRPVEQSPQEPDSSAGIGKSGAQPAKKRLNFGQTGDTESVPDPQPIGEPPAAPSGVGSLTMASGGGAPVADNNEGADGVGSSSGNWHCDSQWLGDRVITTSTRTWALPTYNNHLYKQISNSTSGGSSNDNAYFGYSTPWGYFDFNRFHCHFSPRDWQRLINNNWGFRPKRLNFKLFNIQVKEVTDNNGVKTIANNLTSTVQVFTDSDYQLPYVLGSAHEGCLPPFPADVFMIPQYGYLTLNDGSQAVGRSSFYCLEYFPSQMLRTGNNFQFNYEFENVPFHSSYAHSQSLDRLMNPLIDQYLYYLSKTINDSGQNQQTLKFSVAGPSNMAVQGRNYIPGPSYRQQRVSTTVTQNNNSEFAWPGASSWALNGRNSLMNPGPAMASHKEGEDRFFPLSGSLIFGKQGTGRDNVDADEVMITNEEEIKTTNPVATESYGQVAINHQSAQAQAQTGWVQNQGILPGMVWQDRDVYLQGPIWAKIPHTDGNFHPSPLMGGFGMKHPPPQILIKNTPVPADPPTAFNKDKLNSFITQYSTGQVSVEIEWELQKENSKRWNPEIQYTSNYYKSNNVEFAVNTEGVYSEPRPIGTRYLTRNL

SEQ ID NO: 1090 - protein, 633 aa, Artificial Sequence
  Synthetic polypeptide
MYTIWMPENPRPGTPCDIFTNSRGKRASNGGGGGSAPGKKRPVEQSPQEPDSSAGIGKSGAQPAKKRLNFGQTGDTESVPDPQPIGEPPAAPSGVGSLTMASGGGAPVADNNEGADGVGSSSGNWHCDSQWLGDRVITTSTRTWALPTYNNHLYKQISNSTSGGSSNDNAYFGYSTPWGYFDFNRFHCHFSPRDWQRLINNNWGFRPKRLNFKLFNIQVKEVTDNNGVKTIANNLTSTVQVFTDSDYQLPYVLGSAHEGCLPPFPADVFMIPQYGYLTLNDGSQAVGRSSFYCLEYFPSQMLRTGNNFQFNYEFENVPFHSSYAHSQSLDRLMNPLIDQYLYYLSKTINDSGQNQQTLKFSVAGPSNMAVQGRNYIPGPSYRQQRVSTTVTQNNNSEFAWPGASSWALNGRNSLMNPGPAMASHKEGEDRFFPLSGSLIFGKQGTGRDNVDADEVMITNEEEIKTTNPVATESYGQVAINHQSAQAQAQTGWVQNQGILPGMVWQDRDVYLQGPIWAKIPHTDGNFHPSPLMGGFGMKHPPPQILIKNTPVPADPPTAFNKDKLNSFITQYSTGQVSVEIEWELQKENSKRWNPEIQYTSNYYKSNNVEFAVNTEGVYSEPRPIGTRYLTRNL

SEQ ID NO: 1091 - protein, 623 aa, Artificial Sequence
  Synthetic polypeptide
MTFFYGGSRGKRNNFKTEEYGGGGSAPGKKRPVEQSPQEPDSSAGIGKSGAQPAKKRLNFGQTGDTESVPDPQPIGEPPAAPSGVGSLTMASGGGAPVADNNEGADGVGSSSGNWHCDSQWLGDRVITTSTRTWALPTYNNHLYKQISNSTSGGSSNDNAYFGYSTPWGYFDFNRFHCHFSPRDWQRLINNNWGFRPKRLNFKLFNIQVKEVTDNNGVKTIANNLTSTVQVFTDSDYQLPYVLGSAHEGCLPPFPADVFMIPQYGYLTLNDGSQAVGRSSFYCLEYFPSQMLRTGNNFQFNYEFENVPFHSSYAHSQSLDRLMNPLIDQYLYYLSKTINDSGQNQQTLKFSVAGPSNMAVQGRNYIPGPSYRQQRVSTTVTQNNNSEFAWPGASSWALNGRNSLMNPGPAMASHKEGEDRFFPLSGSLIFGKQGTGRDNVDADEVMITNEEEIKTTNPVATESYGQVAINHQSAQAQAQTGWVQNQGILPGMVWQDRDVYLQGPIWAKIPHTDGNFHPSPLMGGFGMKHPPPQILIKNTPVPADPPTAFNKDKLNSFITQYSTGQVSVEIEWELQKENSKRWNPEIQYTSNYYKSNNVEFAVNTEGVYSEPRPIGTRYLTRNL

SEQ ID NO: 1092 - protein, 623 aa, Artificial Sequence
  Synthetic polypeptide
MAAAAAAAAAAAAAAAAAAAGGGGSAPGKKRPVEQSPQEPDSSAGIGKSGAQPAKKRLNFGQTGDTESVPDPQPIGEPPAAPSGVGSLTMASGGGAPVADNNEGADGVGSSSGNWHCDSQWLGDRVITTSTRTWALPTYNNHLYKQISNSTSGGSSNDNAYFGYSTPWGYFDFNRFHCHFSPRDWQRLINNNWGFRPKRLNFKLFNIQVKEVTDNNGVKTIANNLTSTVQVFTDSDYQLPYVLGSAHEGCLPPFPADVFMIPQYGYLTLNDGSQAVGRSSFYCLEYFPSQMLRTGNNFQFNYEFENVPFHSSYAHSQSLDRLMNPLIDQYLYYLSKTINDSGQNQQTLKFSVAGPSNMAVQGRNYIPGPSYRQQRVSTTVTQNNNSEFAWPGASSWALNGRNSLMNPGPAMASHKEGEDRFFPLSGSLIFGKQGTGRDNVDADEVMITNEEEIKTTNPVATESYGQVAINHQSAQAQAQTGWVQNQGILPGMVWQDRDVYLQGPIWAKIPHTDGNFHPSPLMGGFGMKHPPPQILIKNTPVPADPPTAFNKDKLNSFITQYSTGQVSVEIEWELQKENSKRWNPEIQYTSNYYKSNNVEFAVNTEGVYSEPRPIGTRYLTRNL

SEQ ID NO: 1093 - DNA, 2214 bp, Artificial Sequence
  Synthetic polynucleotide
atggctgccgatggttatcttccagattggctcgaggacaacctctctgagggcattcgcgagtggtgggacttgaaacctggagccccgaagcccaaagccaaccagcaaaagcaggacgacggccggggtctggtgcttcctggctacaagtacctcggacccttcaacggactcgacaagggggagcccgtcaacgcggcggacgcagcggccctcgagcacgacaaggcctacgaccagcagctcaaagcgggtgacaatccgtacctgcggtataaccacgccgacgtcgagtttcaggagcgtctgcaagaagatacgtcttttgggggcaacctcgggcgagcagtcttccaggccaagaagagggttctcgaaccttttggtctggttgaggaaggcgctaagacggctcctggaaagaaacgtccggtagagcagtcgccacaagagccagactcctcctcgggcatcggcaagaaaggccaacagcccgccagaaaaagactcaattttggccagactggcgactcagagtcagttccagaccctcaacctctcggagaacctccagcagcgccctctggtgtgggacctaatacaatggctgcaggcggtggcgcaccaatggcagacaataacgagggcgccgacggagtgggtaattcctcgggaaattggcattgcgattccacatggatgggggacagagtcatcaccaccagcacccgaacctgggccctgcccacctacaacaaccacctctacaagcaaatctccaacggcacctcgggaggaagcaccaacgacaacacctattttggctacagcaccccctgggggtattttgatttcaacagattccactgccacttctcaccacgtgactggcagcgactcatcaacaacaactggggattccggccaaaaagactcagcttcaagctcttcaacatccaggtcaaggaggtcacgcagaatgaaggcaccaagaccatcgccaataaccttaccagcacgattcaggtatttacggactcggaataccagctgccatacgtcctcggctccgcgcaccagggctgcctgcctccgttcccggcggacgtcttcatgattccccagtacggctaccttacactgaacaatggaagtcaagccgtaggccgttcctccttctactgcctggaatattttccttctcaaatgctgagaacgggcaacaactttgagttcagctaccagtttgaggacgtgccttttcacagcagctacgcgcacagccaaagcctggaccggctgatgaaccccctcatcgaccagtacctgtactacctgtctcggactcagtccacgggaggtaccgcaagaactcagcagttgctattttctcaggccgggcctaatacaatggccaatcaggcaaagaactggctgccaggaccctgttaccgccaacaacgcgtctcaacgacaaccgggcaaaacaacaatagcaactctgcctggactgctgggaccaaataccatctgaatggaagaaattcattggctaatcctggcatcgctatggcaacacacaaagacgacgaggagcgtttttttcccagtaacgggatcctgatttttggcaaacaaaatgctgccagagacaatgcggattacagcgatgtcatgctcaccagcgaggaagaaatcaaaaccactaaccctgtggctacagaggaatacggtatcgtggcagataacttgcagcagcaaaacacggctcctcaaattggaactgtcaacagccagggggccttacccggtatggtctggcagaaccgggacgtgtacctgcagggtcccatctgggccaagattcctcacacggacggcaacttccacccatctccgctgatgggcggctttggcctgaaacatcctccgcctcagatcctgatcaagaacacgcctgtacctgcggatcctccgaccaccttcaaccagtcaaagctgaactctttcatcacgcaatacagcaccggacaggtcagcgtggaaattgaatgggagctacagaaggaaaacagcaagcgctggaaccccgagatccagtacacctccaactactacaaatctacaagtgtggactttgctgttaatacagaaggcgtgtactctgaaccccgccccattggcacccgttacctcacccgtaatctgtaa

SEQ ID NO: 1094 - DNA, 2214 bp, Artificial Sequence
  Synthetic polynucleotide
atggctgccgatggttatcttccagattggctcgaggacaacctctctgagggcattcgcgagtggtgggcgctgaaacctggagccccgaagcccaaagccaaccagcaaaagcaggacgacggccggggtctggtgcttcctggctacaagtacctcggacccttcaacggactcgacaagggggagcccgtcaacgcggcggacgcagcggccctcgagcacgacaaggcctacgaccagcagctcaaagcgggtgacaatccgtacctgcggtataaccacgccgacgccgagtttcaggagcgtctgcaagaagatacgtcttttgggggcaacctcgggcgagcagtcttccaggccaagaagcgggttctcgaacctctcggtctggttgaggacggcgctaagacggctcctggaaagaagagaccagtagagcagtcaccccaagaaccagactcctcctcgggcatcggcaagaaaggccaacagcccgccagaaaaagactcaattttggccagactggcgactcagagtcagttccagaccctcaacctctcggagaacctccagcaacccccgctgctgtgggacctactacaatggcttcaggcggtggcgcaccaatggcagacaataacgaaggcgccgacggagtgggtagttcctcgggaaattggcattgcgattccacatggctgggcgacagagtcatcaccaccagcacccgaacctgggccctgcccacctacaacaaccacctctacaagcaaatctccaacgggacatcgggaggagccaccaacgacaacacctacttcggctacagcaccccctgggggtattttgactttaacagattccactgccacttttcaccacgtgactggcagcgactcatcaacaacaactggggattccggcccaagagactcagcttcaagctcttcaacatccaggtcaaggaggtcacgcagaatgaaggcaccaagaccatcgccaataacctcaccagcaccatccaggtgtttacggactcggagtaccagctgccgtacgttctcggctctgcccaccagggctgcctgcctccgttcccggcggacgtgttcatgattccccagtacggctacctaacactcaacaacggtagtcaggccgtgggacgctcctccttctactgcctggaatactttccttcgcagatgctgagaaccggcaacaacttccagtttacttacaccttcgaggacgtgcctttccacagcagctacgcccacagccagagcttggaccggctgatgaatcctctgattgaccagtacctgtactacttgtctcggactcaaacaacaggaggcacggcaaatacgcagactctgggcttcagccaaggtgggcctaatacaatggccaatcaggcaaagaactggctgccaggaccctgttaccgccaacaacgcgtctcaacgacaaccgggcaaaacaacaatagcaactttgcctggactgctgggaccaaataccatctgaatggaagaaattcattggctaatcctggcatcgctatggcaacacacaaggacgacgaggagcgtttttttcccagtaacgggatcctgatttttggcaaacaaaatgctgccagagacaatgcggattacagcgatgtcatgctcaccagcgaggaagaaatcaaaaccactaaccctgtggctacagaggaatacggtatcgtggcagataacttgcagcagcaaaacacggctcctcaaattggaactgtcaacagccagggggccttacccggtatggtctggcagaaccgggacgtgtacctgcagggtcccatctgggccaagattcctcacacggacggcaacttccacccgtctccgctgatgggcggctttggcctgaaacatcctccgcctcagatcctgatcaagaacacgcctgtacctgcggatcctccgaccaccttcaaccagtcaaagctgaactctttcatcacgcaatacagcaccggacaggtcagcgtggaaatcgagtgggagctgcagaaagaaaacagcaagcgctggaaccccgagatccagtacacctccaactactacaaatctacaaatgtggactttgctgtcaacacggagggggtttatagcgagcctcgccccattggcacccgttacctcacccgcaacctgtaa

SEQ ID NO: 1095 - DNA, 2211 bp, Artificial Sequence
  Synthetic polynucleotide
  modified_base (715)..(715): a, c, t, or g
  misc_feature (715)..(715): n is a, c, g, or t
atggctgccgatggttatcttccagattggctcgaggacaacctctctgagggcattcgcgagtggtgggcgctgaaacctggagccccgaagcccaaagccaaccagcaaaagcaggacgacggccggggtctggtgcttcctggctacaagtacctcggacccttcaacggactcgacaagggggagcccgtcaacgcggcggacgcagcggccctcgagcacgacaaggcctacgaccagcagctcaaagcgggtgacaatccgtacctgcggtataaccacgccgacgccgagtttcaggagcgtctgcaagaagatacgtcttttgggggcaacctcgggcgagcagtcttccaggccaagaagcgggttctcgaacctctcggtctggttgaggaaggcgctaagacggctcctggaaagaaacgtccggtagagcagtcgccacaagagccagactcctcctcgggcatcggcaagacaggccagcagcccgctaaaaagaggctcaattttggtcagactggcgactcagagtcagtccccgacccacaacctctcggagaacctccagcaacccccgctgctgtgggacctactacaatggcttcaggcggtggcgcaccaatggcagacaataacgaaggcgccgacggagtgggtaatgcctcaggaaattggcattgcgattccacatggctgggcgacagantcatcaccaccagcacccgaacatgggccttgcccacctataacaaccacctctacaagcaaatctccagtgcttcaacgggggccagcaacgacaaccactacttcggctacagcaccccctgggggtattttgatttcaacagattccactgccatttctcaccacgtgactggcagcgactcatcaacaacaattggggattccggcccaagagactcaacttcaagctcttcaacatccaagtcaaggaggtcacgcagaatgaaggcaccaagaccatcgccaataacctcaccagcaccatccaggtgtttacggactcggagtaccagctgccgtacgttctcggctctgcccaccagggctgcctgcctccgttcccggcggacgtgttcatgattccccagtacggctacctaacactcaacaacggtagtcaggccgtgggacgctcctccttctactgcctggaatattttccatctcaaatgctgcgaactggaaacaattttgaattcagctacaccttcgaggacgtgcctttccacagcagctacgcacacagccagagcttggaccgactgatgaatcctctcatcgaccagtacctgtactacttgtctcggactcaaacaacaggaggcacggcaaatacgcagactctgggcttcagccaaggtgggcctaatacaatggccaatcaggcaaagaactggctgccaggaccctgttaccgccaacaacgcgtctcaacgacaaccgggcaaaacaacaatagcaactttgcctggactgctgggaccaaataccatctgaatggaagaaattcattggctaatcctggcatcgctatggcaacacacaaagacgacgaggagcgtttttttcccagtaacgggatcctgatttttggcaaacaaaatgctgccagagacaatgcggattacagcgatgtcatgctcaccagcgaggaagaaatcaaaaccactaaccctgtggctacagaggaatacggtatcgtggcagataacttgcagcagcaaaacacggctcctcaaattggaactgtcaacagccaggggaccttacccggtatggtctggcagaaccgggacgtgtacctgcagggtcccatctgggccaagattcctcacacggacggcaacttccacccgtctccgctgatgggcggctttggcctgaaacatcctccgcctcagatcctgatcaagaacacgcctgtacctgcggatcctccgaccaccttcaaccagtcaaagctgaactctttcatcacgcaatacagcaccggacaggtcagcgtggaaattgaatgggagctacagaaggaaaacagcaagcgctggaaccccgagatccagtacacctccaattactacaaatctacaagtgtggactttgctgttaatacagaaggcgtgtactctgaaccccgccccattggcacgcgtttcctcacccgtaatctgtaa

SEQ ID NO: 1096 - DNA, 2214 bp, Artificial Sequence
  Synthetic polynucleotide
atggctgccgatggttatcttccagattggctcgaggacaacctctctgagggcattcgcgagtggtgggcgctgaaacctggagccccgaagcccaaagccaaccagcaaaagcaggacgacggccggggtctggtgcttcctggctacaagtacctcggacccttcaacggactcgacaagggggagcccgtcaacgcggcggacgcagcggccctcgagcacgacaaggcctacgaccagcagctcaaagcgggtgacaatccgtacctgcggtataaccacgccgacgccgagtttcaggagcgtctgcaagaagatacgtcttttgggggcaacctcgggcgagcagtcttccaggccaagaagcgggttctcgaacctctcggtctggttgaggaaggcgctaagacggctcctggaaagaaacgtccggtagagcagtcgccacaagagccagactcctcctcgggcatcggcaagacaggccagcagcccgctaaaaagaggctcaattttggccagactggcgactcagagtcagttccagaccctcaacctctcggagaacctccagcagcgccctctggtgtgggacctaatacaatggctgcaggcggtggcgcaccaatggcagacaataacgaaggcgccgacggagtgggtagttcctcgggaaattggcattgcgattccacatggctgggcgacagagtcatcaccaccagcacccgaacctgggccctgcccacctacaacaaccacctctacaagcaaatctccaacgggacatcgggaggagccaccaacgacaacacctacttcggctacagcaccccctgggggtattttgactttaacagattccactgccacttttcaccacgtgactggcagcgactcatcaacaacaactggggattccggcccaagagactcagcttcaagctcttcaacatccaggtcaaggaggtcacgcagaatgaaggcaccaagaccatcgccaataacctcaccagcaccatccaggtgtttacggactcggagtaccagctgccgtacgtactaggatccgctcaccagggatgtctgcctccgttcccggcggacgtgttcatgattccccagtacggctacctaacactcaacaacggtagtcaggccgtgggacgctcctccttctactgcctggaatattttccatctcagatgctgagaacgggcaataactttaccttcagctacaccttcgaggacgtgcctttccacagcagctatgcccacagccagagcttggaccggctgatgaatcctctgattgaccagtacctgtactacttgtctcggactcaaacaacaggaggcacggcaaatacgcagactctgggcttcagccaaggtgggcctaatacaatggccaatcaggcaaagaactggctgccaggaccctgttaccgccaacaacgcgtctcaacgacaaccgggcaaaacaacaatagcaactttgcctggactgctgggaccaaataccatctgaatggaagaaattcattggctaatcctggcatcgctatggcaacacacaaagacgacgaggagcgtttttttcccagtaacgggatcctgatttttggcaaacaaaatgctgccagagacaatgcggattacagcgatgtcatgctcaccagcgaggaagaaatcaaaaccactaaccctgtggctacagaggaatacggtatcgtggcagataacttgcagcagcaaaacacggctcctcaaattggaactgtcaacagccagggggccttacccggtatggtctggcagaaccgggacgtgtacctgcagggtcccatctgggccaagattcctcacacggacggcaacttccacccgtctccgctaatgggaggatttggactgaagcacccacctcctcagatcctgatcaagaacacgccggtacctgcggatcctccgaccaccttcaaccagtcaaagctgtactctttcatcacgcaatacagcaccggacaggtcagcgtggaaattgaatgggagctgcagaaggaaaacagcaagcgctggaaccccgagatccaatacacctccaactactacaaatctacaagtgtggactttgctgttaatacagaaggcgtgtactctgaaccccgccccattggcacccgttacctcacccgtaatctgtaa

SEQ ID NO: 1097 - protein, 737 aa, Artificial Sequence
  Synthetic polypeptide
MAADGYLPDWLEDNLSEGIREWWDLKPGAPKPKANQQKQDDGRGLVLPGYKYLGPFNGLDKGEPVNAADAAALEHDKAYDQQLKAGDNPYLRYNHADVEFQERLQEDTSFGGNLGRAVFQAKKRVLEPFGLVEEGAKTAPGKKRPVEQSPQEPDSSSGIGKKGQQPARKRLNFGQTGDSESVPDPQPLGEPPAAPSGVGPNTMAAGGGAPMADNNEGADGVGNSSGNWHCDSTWMGDRVITTSTRTWALPTYNNHLYKQISNGTSGGSTNDNTYFGYSTPWGYFDFNRFHCHFSPRDWQRLINNNWGFRPKRLSFKLFNIQVKEVTQNEGTKTIANNLTSTIQVFTDSEYQLPYVLGSAHQGCLPPFPADVFMIPQYGYLTLNNGSQAVGRSSFYCLEYFPSQMLRTGNNFEFSYQFEDVPFHSSYAHSQSLDRLMNPLIDQYLYYLSRTQSTGGTARTQQLLFSQAGPNTMANQAKNWLPGPCYRQQRVSTTTGQNNNSNSAWTAGTKYHLNGRNSLANPGIAMATHKDDEERFFPSNGILIFGKQNAARDNADYSDVMLTSEEEIKTTNPVATEEYGIVADNLQQQNTAPQIGTVNSQGALPGMVWQNRDVYLQGPIWAKIPHTDGNFHPSPLMGGFGLKHPPPQILIKNTPVPADPPTTFNQSKLNSFITQYSTGQVSVEIEWELQKENSKRWNPEIQYTSNYYKSTSVDFAVNTEGVYSEPRPIGTRYLTRNL

SEQ ID NO: 1098 - protein, 737 aa, Artificial Sequence
  Synthetic polypeptide
MAADGYLPDWLEDNLSEGIREWWALKPGAPKPKANQQKQDDGRGLVLPGYKYLGPFNGLDKGEPVNAADAAALEHDKAYDQQLKAGDNPYLRYNHADAEFQERLQEDTSFGGNLGRAVFQAKKRVLEPLGLVEDGAKTAPGKKRPVEQSPQEPDSSSGIGKKGQQPARKRLNFGQTGDSESVPDPQPLGEPPATPAAVGPTTMASGGGAPMADNNEGADGVGSSSGNWHCDSTWLGDRVITTSTRTWALPTYNNHLYKQISNGTSGGATNDNTYFGYSTPWGYFDFNRFHCHFSPRDWQRLINNNWGFRPKRLSFKLFNIQVKEVTQNEGTKTIANNLTSTIQVFTDSEYQLPYVLGSAHQGCLPPFPADVFMIPQYGYLTLNNGSQAVGRSSFYCLEYFPSQMLRTGNNFQFTYTFEDVPFHSSYAHSQSLDRLMNPLIDQYLYYLSRTQTTGGTANTQTLGFSQGGPNTMANQAKNWLPGPCYRQQRVSTTTGQNNNSNFAWTAGTKYHLNGRNSLANPGIAMATHKDDEERFFPSNGILIFGKQNAARDNADYSDVMLTSEEEIKTTNPVATEEYGIVADNLQQQNTAPQIGTVNSQGALPGMVWQNRDVYLQGPIWAKIPHTDGNFHPSPLMGGFGLKHPPPQILIKNTPVPADPPTTFNQSKLNSFITQYSTGQVSVEIEWELQKENSKRWNPEIQYTSNYYKSTNVDFAVNTEGVYSEPRPIGTRYLTRNL

SEQ ID NO: 1099 - protein, 736 aa, Artificial Sequence
  Synthetic polypeptide
  MOD_RES (239)..(239): Any naturally occurring amino acid
MAADGYLPDWLEDNLSEGIREWWALKPGAPKPKANQQKQDDGRGLVLPGYKYLGPFNGLDKGEPVNAADAAALEHDKAYDQQLKAGDNPYLRYNHADAEFQERLQEDTSFGGNLGRAVFQAKKRVLEPLGLVEEGAKTAPGKKRPVEQSPQEPDSSSGIGKTGQQPAKKRLNFGQTGDSESVPDPQPLGEPPATPAAVGPTTMASGGGAPMADNNEGADGVGNASGNWHCDSTWLGDRXITTSTRTWALPTYNNHLYKQISSASTGASNDNHYFGYSTPWGYFDFNRFHCHFSPRDWQRLINNNWGFRPKRLNFKLFNIQVKEVTQNEGTKTIANNLTSTIQVFTDSEYQLPYVLGSAHQGCLPPFPADVFMIPQYGYLTLNNGSQAVGRSSFYCLEYFPSQMLRTGNNFEFSYTFEDVPFHSSYAHSQSLDRLMNPLIDQYLYYLSRTQTTGGTANTQTLGFSQGGPNTMANQAKNWLPGPCYRQQRVSTTTGQNNNSNFAWTAGTKYHLNGRNSLANPGIAMATHKDDEERFFPSNGILIFGKQNAARDNADYSDVMLTSEEEIKTTNPVATEEYGIVADNLQQQNTAPQIGTVNSQGTLPGMVWQNRDVYLQGPIWAKIPHTDGNFHPSPLMGGFGLKHPPPQILIKNTPVPADPPTTFNQSKLNSFITQYSTGQVSVEIEWELQKENSKRWNPEIQYTSNYYKSTSVDFAVNTEGVYSEPRPIGTRFLTRNL

SEQ ID NO: 1100 - protein, 737 aa, Artificial Sequence
  Synthetic polypeptide
MAADGYLPDWLEDNLSEGIREWWALKPGAPKPKANQQKQDDGRGLVLPGYKYLGPFNGLDKGEPVNAADAAALEHDKAYDQQLKAGDNPYLRYNHADAEFQERLQEDTSFGGNLGRAVFQAKKRVLEPLGLVEEGAKTAPGKKRPVEQSPQEPDSSSGIGKTGQQPAKKRLNFGQTGDSESVPDPQPLGEPPAAPSGVGPNTMAAGGGAPMADNNEGADGVGSSSGNWHCDSTWLGDRVITTSTRTWALPTYNNHLYKQISNGTSGGATNDNTYFGYSTPWGYFDFNRFHCHFSPRDWQRLINNNWGFRPKRLSFKLFNIQVKEVTQNEGTKTIANNLTSTIQVFTDSEYQLPYVLGSAHQGCLPPFPADVFMIPQYGYLTLNNGSQAVGRSSFYCLEYFPSQMLRTGNNFTFSYTFEDVPFHSSYAHSQSLDRLMNPLIDQYLYYLSRTQTTGGTANTQTLGFSQGGPNTMANQAKNWLPGPCYRQQRVSTTTGQNNNSNFAWTAGTKYHLNGRNSLANPGIAMATHKDDEERFFPSNGILIFGKQNAARDNADYSDVMLTSEEEIKTTNPVATEEYGIVADNLQQQNTAPQIGTVNSQGALPGMVWQNRDVYLQGPIWAKIPHTDGNFHPSPLMGGFGLKHPPPQILIKNTPVPADPPTTFNQSKLYSFITQYSTGQVSVEIEWELQKENSKRWNPEIQYTSNYYKSTSVDFAVNTEGVYSEPRPIGTRYLTRNL

SEQ ID NO: 1101 - DNA, 2208 bp, Artificial Sequence
  Synthetic polynucleotide
atggctgccgatggttatcttccagattggctcgaggacaacctctctgagggcattcgcgagtggtgggacttgaaacctggagccccgaaacccaaagccaaccagcaaaagcaggacgacggccggggtctggtgcttcctggctacaagtacctcggacccttcaacggactcgacaagggggagcccgtcaacgcggcggatgcagcggccctcgagcacgacaaagcctacgaccggcagctcgacagcggagacaacccgtacctcaagtacaaccacgccgacgcggagtttcaggagcgccttaaagaagatacgtcttttgggggcaacctcggacgagcagtcttccaggccaagaagagggttctcgaaccttttggtctggttgaggaaggtgctaagacggctcctggaaagaaacgtccggtagagcagtcgccacaagagccagactcctcctcgggcattggcaagacaggccagcagcccgctaaaaagagactcaattttggtcagactggcgactcagagtcagtccccgacccacaacctctcggagaacctccagcaacccccgctgctgtgggacctactacaatggcttcaggtggtggcgcaccagtggcagacaataacgaaggcgccgacggagtgggtagttcctcgggaaattggcattgcgattccacatggctgggcgacagagtcatcaccaccagcacccgaacatgggccttgcccacctataacaaccacctctacaagcaaatctccagtgcttcgacgggggccagcaacgacaaccactacttcggctacagcaccccctgggggtattttgatttcaacaggttccactgccatttctcaccacgtgactggcagcgactcatcaacaacaattggggattccggcccaaaagactcaacttcaagctgttcaacatccaggtcaaggaagtcacgacgaacgaaggcaccaagaccatcgccaataatctcaccagcaccgtgcaggtctttacggactcggagtaccagttaccgtacgtgctaggatccgctcaccagggatgtctgcctccgttcccggcggacgtcttcatggttcctcagtacggctatttaactttaaacaatggaagccaagccctgggacgttcctccttctactgtctggagtatttcccatcgcagatgctgagaacgggcaacaactttacctttagctacaccttcgaggacgtgcctttccacagcagctacgcgcacagccagagcctggacaggctgatgaatcccctcatcgaccagtacctgtactacctggtcagaacgcaaacgactggaactggagggacgcagactctggcattcagccaagcgggtcctagctcaatggccaaccaggctagaaattgggtgcccggaccttgctaccggcagcagcgcgtctccacgacaaccaaccagaacaacaacagcaactttgcctggacgggagctgccaagtttaagctgaacggccgagactctctaatgaatccgggcgtggcaatggcttcccacaaggatgacgacgaccgcttcttcccttcgagcggggtcctgatttttggcaagcaaggagccgggaacgatggagtggattacagccaagtgctgattacagatgaggaagaaatcaaggctaccaaccccgtggccacagaagaatatggagcagtggccatcaacaaccaggccgccaatacgcaggcgcagaccggactcgtgcacaaccagggggtgattcccggcatggtgtggcagaatagagacgtgtacctgcagggtcccatctgggccaaaattcctcacacggacggcaactttcacccgtctcccctgatgggcggctttggactgaagcacccgcctcctcaaattctcatcaagaacacaccggttccagcggacccgccgcttaccttcaaccaggccaagctgaactctttcatcacgcagtacagcaccggacaggtcagcgtggaaatcgagtgggagctgcagaaagaaaacagcaaacgctggaatccagagattcaatacacttccaactactacaaatctacaaatgtggactttgctgtcaacacggagggggtttatagcgagcctcgccccattggcacccgttacctcacccgcaacctgtaa

SEQ ID NO: 1102 - DNA, 2211 bp, Artificial Sequence
  Synthetic polynucleotide
  modified_base (337)..(337): a, c, t, or g
  misc_feature (337)..(337): n is a, c, g, or t
atggctgccgatggttatcttccagattggctcgaggacactctctctgaaggaataagacagtggtggaagctcaaacctggcccaccaccaccaaagcccgcagagcggcataaggacgacagcaggggtcttgtgcttcctggctacaagtacctcggacccttcaacggactcgacaagggggagcccgtcaacgcggcggacgcagcgaccctcgagcacgacaaggcctacgaccagcagctcaaagcgggtgacaatccgtacctgcggtataaccacgccgacgccgagtttcaggagcgtctgcaagaagatacgtcttttgggggcnacctcgggcgagcagtcttccaggccaagaagcgggttctcgaacctctcggtctggttgaggaagctgctaagacggctcctggaaagaagagaccagtagagccatcaccccagcgttctccagactcctctacgggcatcggcaagaaaggccaacagcccgccagaaaaagactcaattttggtcagactggcgactcagagtcagttccagaccctcaacctctcggagaacctccagcagcgccctctggtgtgggacctaatacaatggctgcaggcggtggcgcaccaatggcagacaataacgaaggcgccgacggagtgggtagttcctcgggaaattggcattgcgattccacatggctgggcgacagagtcatcaccaccagcacccgaacctgggccctgcccacctacaacaaccacctctacaagcaaatctccagtgcttcaacgggggccagcaacgacaaccactacttcggctacagcaccccctgggggtattttgatttcaacagattccactgccatttctcaccacgtgactggcagcgactcatcaacaacaattggggattccggcccaagagactcaacttcaagctcttcaacatccaagtcaaggaggtcacgacgaatgatggcgtcacgaccatcgctaataaccttaccagcacggttcaagtcttctcggactcagactatcagctcccgtacgtgctcgggtcggctcacgagggctgcctcccgccgttcccagcggacgttttcatgattcctcagtacggctatttaactttaaacaatggaagccaagccctgggacgttcctccttctactgtctggagtatttcccatcgcagatgctgagaaccggcaacaactttcagttcagctacaccttcgaggacgtgcctttccacagcagctacgcgcacagccagagcctggacaggctgatgaatcccctcatcgaccagtacctgtactacctggtcagaacgcaaacgactggaactggagggacgcagactctggcattcagccaagcgggtcctagctcaatggccaaccaggctagaaattgggtgcccggaccttgctaccggcagcagcgcgtctccacgacaaccaaccagaacaacaacagcaactttgcctggacgggagctgccaagtttaagctgaacggccgagactctctaatgaatccgggcgtggcaatggcttcccacaaggatgacgacgaccgcttcttcccttcgagcggggtcctgatttttggcaagcaaggagccgggaacgatggagtggattacagccaagtgctgattacagatgaggaagaaatcaaggctaccaaccccgtagccacagaagaatatggagcagtggccatcaacaaccaggccgccaatacgcaggcgcagaccggactcgtgcacaaccagggggtgattcccggaatggtgtggcaagacagagacgtatacctgcagggtcctatttgggccaaaattcctcacacggatggacactttcacccgtctcctctcatgggcggctttggacttaagcacccgcctcctcagatcctcatcaaaaacacgcctgttcctgcgaatcctccggcagagttttcggctacaaagtttgcttcattcatcacccagtattccacaggacaagtgagcgtggagattgaatgggagctgcagaaagaaaacagcaaacgctggaatcccgaagtgcagtatacatctaactatgcaaaatctgccaacgttgatttcactgtggacaacaatggactttatactgagcctcgccccattggcacccgttacctcacccgtcccctgtaa

SEQ ID NO: 1103 - DNA, 2214 bp, Artificial Sequence
  Synthetic polynucleotide
  modified_base (335)..(335): a, c, t, or g
  misc_feature (335)..(335): n is a, c, g, or t
atgactgacggttaccttccagattggctagaggacaacctctctgaaggcgttcgagagtggtgggcgctgcaacctggagccccgaagcccaaagccaaccagcaaaagcaggacgacggccggggtctggtgcttcctggctacaagtacctcggacccttcaacggactcgacaagggggagcccgtcaacgcggcggacgcagcggccctcgagcacgacaaggcctacgaccagcagctcaaagcgggtgacaatccgtacctgcggtataaccacgccgacgccgagtttcaggagcgtctgcaagaagatacgtcttttgggggcancctcgggcgagcagtcttccaggccaagaagcgggttctcgaacctctcggtctggttgaggaaggcgctaagacggctcctggaaagaaacgtccggtagagccatcaccccagcgttctccagactcctctacgggcatcggcaagaaaggccaacagcccgccagaaaaagactcaattttggtcagactggcgactcagagtcagttccagaccctcaacctctcggagaacctccagcagcgccctcaggtgtgggatctcttacaatggcttcaggtggtggcgcaccagtggcagacaataacgaaggtgccgatggagtgggtagttcctcgggaaattggcattgcgattcccaatggctgggggacagagtcatcaccaccagcacccgaacctgggccctgcccacctacaacaatcacctctacaagcaaatctccaacagcacatctggaggatcttcaaatgacaacgcctacttcggctacagcaccccctgggggtattttgacttcaacagattccactgccacttctcaccacgtgactggcagcgactcatcaacaacaactggggattccggcccaagagactcagcttcaagctcttcaacatccaggtcaaggaggtcacgcagaatgaaggcaccaagaccatcgccaataacctcaccagcaccatccaggtgtttacggactcggagtaccagctgccgtacgttctcggctctgcccaccagggctgcctgcctccgttcccggcggacgtgttcatgattccccagtacggctacctaacactcaacaacggtagtcaggccgtgggacgctcctccttctactgcctggaatactttccttcgcagatgctgagaaccggcaacaacttccagtttacttacaccttcgaggacgtgcctttccacagcagctacgcccacagccagagcttggaccggctgatgaatcctctgattgaccagtacctgtactacttgtctcggactcaaacaacaggaggcacggcaaatacgcagactctgggcttcagccaaggtgggcctaatacaatggccaatcaggcaaagaactggctgccaggaccctgttaccgccaacaacgcgtctcaacgacaaccgggcaaaacaacaatagcaactttgcctggactgctgggaccaaataccatctgaatggaagaaattcattggctaatcctggcatcgctatggcaacacacaaagacgacgaggagcgtttttttcccagtaacgggatcctgatttttggcaaacaaaatgctgccagagacaatgcggattacagcgatgtcatgctcaccagcgaggaagaaatcaaaaccactaaccctgtggctacagaggaatacggtatcgtggcagataacttgcagcagcaaaacacggctcctcaaattggaactgtcaacagccagggggccttacccggtatggtctggcagaaccgggacgtgtacctgcagggtcccatctgggccaagattcctcacacggacggcaacttccacccgtctccgctgatgggcggctttggcctgaaacatcctccgcctcagatcctgatcaagaacacgcctgtacctgcggatcctccgaccaccttaaaccaggccaagctgaactctttcatcacgcaatacagcaccggacaggtcagcgtggaaattgaatgggagctgcagaaggaaaacagcaagcgctggaacccagagattcagtacacttcaaactactacaaatctacaaatgtggactttgctgtcaatacagagggaacttatagtgaaccccgccccattggcaccagatttctgactcgtaatctgtaa

SEQ ID NO: 1104 - DNA, 2211 bp, Artificial Sequence
  Synthetic polynucleotide
  modified_base (338)..(338): a, c, t, or g
  misc_feature (338)..(338): n is a, c, g, or t
atggctgccgatggttatcttccagattggctcgaggacactctctctgaaggaataagacagtggtggaagctcaaacctggcccaccaccaccaaagcccgcagagcggcataaggacgacagcaggggtcttgtgcttcctgggtacaagtacctcggccccttcaacggactcgacaagggggagcccgtcaacgcggcggacgcagcggccctcgagcacgacaaggcctacgaccagcagctcgaagcgggtgacaatccgtacctgcggtataaccacgccgacgccgagtttcaggagcgtctgcaagaagatacgtcttttgggggcancctcgggcgagcagtcttccaggccaagaagcgggttctcgaacctctcggtctggttgaggaaggcgctaagacggctcctggaaagaagagaccagtagagcagtcaccccaagaaccagactcctcctcgggcatcggcaggaaaggccaacagcccgccagaaaaagactcaattttggccagactggcgactcagagtcagttccagaccctcaacctctcggagaacctccagcagcgccctctggtgtgggacctaatacaatggcttcaggcggtggcgctccaatggcagacaataacgaaggcgccgacggagtgggtaatgcctcaggaaattggcattgcgattccacatggctgggcgacagagtcatcaccaccagcacccgcacctgggccttgcccacctacaataaccacctctacaagcaaatctccagtgcttcaacgggggccagcaacgacaaccactacttcggctacagcaccccctgggggtattttgatttcaacagattccactgccacttttcaccacgtgactggcagcgactcatcaacaacaattggggattccggcccaagagactcaacttcaaactcttcaacatccaggtcaaggaggtcacgcagaatgaaggcactaagaccatcgccaataaccttaccagcacgattcaggtatttacggactcggaataccagctgccgtacgtcctcggctccgcgcaccagggctgcctgcctccgttcccggcggacgtcttcatgattccccagtacggctaccttacactgaacaatggaagtcaagccgtaggccgttcctccttctactgcctggaatattttccatctcaaatgctgcgaactggcaacaacttccagtttacctacaccttcgaggacgtgcctttccacagcagctacgcccacagccagagcttggaccggctgatgaatcctctgattgaccagtacctgtactacttgtctcggactcagtccacaggaggaactcaaggtacccagcaattgttattttctcaagctgggcctgcaaacatgtcggctcaggctaagaactggctacctggaccttgctaccggcagcagcgagtctctacgacactgtcgcaaaacaacaacagcaactttgcttggactggtgccaccaaatatcacctgaacggaagagactctttggtaaatcccggtgtcgccatggcaacccacaaggacgacgaggaacgcttcttcccgtcgagtggagtcctgatgtttggaaaacagggtgctggaagagacaatgtggactacagcagcgttatgctaaccagcgaagaagaaattaaaaccactaaccctgtagccacagaacaatacggtgtggtggttgataacttgcagcaaaccaatacggggcctattgtgggaaatgtcaacagccaaggagccttacctggtatggtctggcagaaccgggacgtgtacctgcagggtcccatctgggccaagattcctcacacggacggcaacttccacccgtctccgctgatgggcggctttggcctgaaacatcctccgcctcagatcctcatcaaaaacacacctgtacctgcggatcctccaacggccttcaacaaggacaagctgaactctttcatcacccagtattctactggccaagtcagcgtggagatcgagtgggagctgcagaaggaaaacagcaagcgctggaacccggagatccagtacacttccaactattacaagtctaataatgttgaatttgctgttaatactgaaggtgtatatagtgaaccccgccccattggcaccagatacctgactcgtaatctgtaa

SEQ ID NO: 1105 - protein, 735 aa, Artificial Sequence
  Synthetic polypeptide
MAADGYLPDWLEDNLSEGIREWWDLKPGAPKPKANQQKQDDGRGLVLPGYKYLGPFNGLDKGEPVNAADAAALEHDKAYDRQLDSGDNPYLKYNHADAEFQERLKEDTSFGGNLGRAVFQAKKRVLEPFGLVEEGAKTAPGKKRPVEQSPQEPDSSSGIGKTGQQPAKKRLNFGQTGDSESVPDPQPLGEPPATPAAVGPTTMASGGGAPVADNNEGADGVGSSSGNWHCDSTWLGDRVITTSTRTWALPTYNNHLYKQISSASTGASNDNHYFGYSTPWGYFDFNRFHCHFSPRDWQRLINNNWGFRPKRLNFKLFNIQVKEVTTNEGTKTIANNLTSTVQVFTDSEYQLPYVLGSAHQGCLPPFPADVFMVPQYGYLTLNNGSQALGRSSFYCLEYFPSQMLRTGNNFTFSYTFEDVPFHSSYAHSQSLDRLMNPLIDQYLYYLVRTQTTGTGGTQTLAFSQAGPSSMANQARNWVPGPCYRQQRVSTTTNQNNNSNFAWTGAAKFKLNGRDSLMNPGVAMASHKDDDDRFFPSSGVLIFGKQGAGNDGVDYSQVLITDEEEIKATNPVATEEYGAVAINNQAANTQAQTGLVHNQGVIPGMVWQNRDVYLQGPIWAKIPHTDGNFHPSPLMGGFGLKHPPPQILIKNTPVPADPPLTFNQAKLNSFITQYSTGQVSVEIEWELQKENSKRWNPEIQYTSNYYKSTNVDFAVNTEGVYSEPRPIGTRYLTRNL

SEQ ID NO: 1106 - protein, 736 aa, Artificial Sequence
  Synthetic polypeptide
  MOD_RES (113)..(113): Any naturally occurring amino acid
MAADGYLPDWLEDTLSEGIRQWWKLKPGPPPPKPAERHKDDSRGLVLPGYKYLGPFNGLDKGEPVNAADAATLEHDKAYDQQLKAGDNPYLRYNHADAEFQERLQEDTSFGGXLGRAVFQAKKRVLEPLGLVEEAAKTAPGKKRPVEPSPQRSPDSSTGIGKKGQQPARKRLNFGQTGDSESVPDPQPLGEPPAAPSGVGPNTMAAGGGAPMADNNEGADGVGSSSGNWHCDSTWLGDRVITTSTRTWALPTYNNHLYKQISSASTGASNDNHYFGYSTPWGYFDFNRFHCHFSPRDWQRLINNNWGFRPKRLNFKLFNIQVKEVTTNDGVTTIANNLTSTVQVFSDSDYQLPYVLGSAHEGCLPPFPADVFMIPQYGYLTLNNGSQALGRSSFYCLEYFPSQMLRTGNNFQFSYTFEDVPFHSSYAHSQSLDRLMNPLIDQYLYYLVRTQTTGTGGTQTLAFSQAGPSSMANQARNWVPGPCYRQQRVSTTTNQNNNSNFAWTGAAKFKLNGRDSLMNPGVAMASHKDDDDRFFPSSGVLIFGKQGAGNDGVDYSQVLITDEEEIKATNPVATEEYGAVAINNQAANTQAQTGLVHNQGVIPGMVWQDRDVYLQGPIWAKIPHTDGHFHPSPLMGGFGLKHPPPQILIKNTPVPANPPAEFSATKFASFITQYSTGQVSVEIEWELQKENSKRWNPEVQYTSNYAKSANVDFTVDNNGLYTEPRPIGTRYLTRPL

SEQ ID NO: 1107 - protein, 737 aa, Artificial Sequence
  Synthetic polypeptide
  MOD_RES (112)..(112): Any naturally occurring amino acid
MTDGYLPDWLEDNLSEGVREWWALQPGAPKPKANQQKQDDGRGLVLPGYKYLGPFNGLDKGEPVNAADAAALEHDKAYDQQLKAGDNPYLRYNHADAEFQERLQEDTSFGGXLGRAVFQAKKRVLEPLGLVEEGAKTAPGKKRPVEPSPQRSPDSSTGIGKKGQQPARKRLNFGQTGDSESVPDPQPLGEPPAAPSGVGSLTMASGGGAPVADNNEGADGVGSSSGNWHCDSQWLGDRVITTSTRTWALPTYNNHLYKQISNSTSGGSSNDNAYFGYSTPWGYFDFNRFHCHFSPRDWQRLINNNWGFRPKRLSFKLFNIQVKEVTQNEGTKTIANNLTSTIQVFTDSEYQLPYVLGSAHQGCLPPFPADVFMIPQYGYLTLNNGSQAVGRSSFYCLEYFPSQMLRTGNNFQFTYTFEDVPFHSSYAHSQSLDRLMNPLIDQYLYYLSRTQTTGGTANTQTLGFSQGGPNTMANQAKNWLPGPCYRQQRVSTTTGQNNNSNFAWTAGTKYHLNGRNSLANPGIAMATHKDDEERFFPSNGILIFGKQNAARDNADYSDVMLTSEEEIKTTNPVATEEYGIVADNLQQQNTAPQIGTVNSQGALPGMVWQNRDVYLQGPIWAKIPHTDGNFHPSPLMGGFGLKHPPPQILIKNTPVPADPPTTLNQAKLNSFITQYSTGQVSVEIEWELQKENSKRWNPEIQYTSNYYKSTNVDFAVNTEGTYSEPRPIGTRFLTRNL

SEQ ID NO: 1108 - protein, 736 aa, Artificial Sequence
  Synthetic polypeptide
  MOD_RES (113)..(113): Any naturally occurring amino acid
MAADGYLPDWLEDTLSEGIRQWWKLKPGPPPPKPAERHKDDSRGLVLPGYKYLGPFNGLDKGEPVNAADAAALEHDKAYDQQLEAGDNPYLRYNHADAEFQERLQEDTSFGGXLGRAVFQAKKRVLEPLGLVEEGAKTAPGKKRPVEQSPQEPDSSSGIGRKGQQPARKRLNFGQTGDSESVPDPQPLGEPPAAPSGVGPNTMASGGGAPMADNNEGADGVGNASGNWHCDSTWLGDRVITTSTRTWALPTYNNHLYKQISSASTGASNDNHYFGYSTPWGYFDFNRFHCHFSPRDWQRLINNNWGFRPKRLNFKLFNIQVKEVTQNEGTKTIANNLTSTIQVFTDSEYQLPYVLGSAHQGCLPPFPADVFMIPQYGYLTLNNGSQAVGRSSFYCLEYFPSQMLRTGNNFQFTYTFEDVPFHSSYAHSQSLDRLMNPLIDQYLYYLSRTQSTGGTQGTQQLLFSQAGPANMSAQAKNWLPGPCYRQQRVSTTLSQNNNSNFAWTGATKYHLNGRDSLVNPGVAMATHKDDEERFFPSSGVLMFGKQGAGRDNVDYSSVMLTSEEEIKTTNPVATEQYGVVVDNLQQTNTGPIVGNVNSQGALPGMVWQNRDVYLQGPIWAKIPHTDGNFHPSPLMGGFGLKHPPPQILIKNTPVPADPPTAFNKDKLNSFITQYSTGQVSVEIEWELQKENSKRWNPEIQYTSNYYKSNNVEFAVNTEGVYSEPRPIGTRYLTRNL

SEQ ID NO: 1109 - DNA, 2211 bp, Artificial Sequence
  Synthetic polynucleotide
atggccgccgacggctacctgcccgactggctggaggacaacctgagcgagggcatccgcgagtggtgggccctgaagcccggcgccccccagcccaaggccaaccagcagcaccaggacaacgcccgcggcctggtgctgcccggctacaagtacctgggccccggcaacggcctggacaagggcgagcccgtgaacgccgccgacgccgccgccctggagcacgacaaggcctacgaccagcagctgaaggccggcgacaacccctacctgaagtacaaccacgccgacgccgagttccaggagcgcctgaaggaggacaccagcttcggcggcaacctgggccgcgccgtgttccaggccaagaagcgcctgctggagcccctgggcctggtggaggaggccgccaagaccgcccccggcaagaagcgccccgtggagcagagcccccaggagcccgacagcagcgccggcatcggcaagagcggcgcccagcccgccaagaagcgcctgaacttcggccagaccggcgacaccgagagcgtgcccgacccccagcccatcggcgagccccccgccgcccccagcggcgtgggcagcctgaccatggccagcggcggcggcgcccccgtggccgacaacaacgagggcgccgacggcgtgggcagcagcagcggcaactggcactgcgacagccagtggctgggcgaccgcgtgatcaccaccagcacccgcacctgggccctgcccacctacaacaaccacctgtacaagcagatcagcaacagcaccagcggcggcagcagcaacgacaacgcctacttcggctacagcaccccctggggctacttcgacttcaaccgcttccactgccacttcagcccccgcgactggcagcgcctgatcaacaacaactggggcttccgccccaagcgcctgaacttcaagctgttcaacatccaggtgaaggaggtgaccgacaacaacggcgtgaagaccatcgccaacaacctgaccagcaccgtgcaggtgttcaccgacagcgactaccagctgccctacgtgctgggcagcgcccacgagggctgcctgccccccttccccgccgacgtgttcatgatcccccagtacggctacctgaccctgaacgacggcagccaggccgtgggccgcagcagcttctactgcctggagtacttccccagccagatgctgcgcaccggcaacaacttccagttcagctacgagttcgagaacgtgcccttccacagcagctacgcccacagccagagcctggaccgcctgatgaaccccctgatcgaccagtacctgtactacctgagcaagaccatcaacggcagcggccagaaccagcagaccctgaagttcagcgtggccggccccagcaacatggccgtgcagggccgcaactacatccccggccccagctaccgccagcagcgcgtgagcaccaccgtgacccagaacaacaacagcgagttcgcctggcccggcgccagcagctgggccctgaacggccgcaacagcctgatgaaccccggccccgccatggccagccacaaggagggcgaggaccgcttcttccccctgagcggcagcctgatcttcggcaagcagggcaccggccgcgacaacgtggacgccgacaaggtgatgatcaccaacgaggaggagatcaagaccaccaaccccgtggccaccgagagctacggccaggtggccaccaaccaccagagcgcccaggcccaggcccagaccggctgggtgcagaaccagggcatcctgcccggcatggtgtggcaggaccgcgacgtgtacctgcagggccccatctgggccaagatcccccacaccgacggcaacttccaccccagccccctgatgggcggcttcggcatgaagcacccccccccccagatcctgatcaagaacacccccgtgcccgccgacccccccaccgccttcaacaaggacaagctgaacagcttcatcacccagtacagcaccggccaggtgagcgtggagatcgagtgggagctgcagaaggagaacagcaagcgctggaaccccgagatccagtacaccagcaactactacaagagcaacaacgtggagttcgccgtgaacaccgagggcgtgtacagcgagccccgccccatcggcacccgctacctgacccgcaacctgtaa

SEQ ID NO: 1110 - DNA, 2211 bp, Artificial Sequence
  Synthetic polynucleotide
atggctgccgatggttatcttccagattggctcgaggacactctctctgaaggaataagacagtggtggaagctcaaacctggcccaccaccaccaaagcccgcagagcggcataaggacgacagcaggggtcttgtgcttcctgggtacaagtacctcggacccttcaacggactcgacaagggagagccggtcaacgaggcagacgccgcggccctcgagcacgacaaggcctacgaccagcagctcaaggccggagacaacccgtacctcaagtacaaccacgccgacgccgagttccaggagcggctcaaagaagatacgtcttttgggggcaacctcggacgagcagtcttccaggccaagaagcgggttctcgaacctctcggtctggttgaggaaggcgctaagacggctcctggaaagaaacgtccggtagagcagtcgccacaagagccagactcctcctcgggcattggcaagacaggccagcagcccgctaaaaagagactcaattttggtcagactggcgactcagagtcagtccccgacccacaacctctcggagaacctccagcaacccccgctgctgtgggacctactacaatggcttcaggcggtggcgcaccaatggcggacaataacgaaggcgccgatggagtgggtagttcctcgggaaattggcattgcgattcccaatggctgggggacagagtcatcaccaccagcacccgaacatgggccttgcccacctataacaaccacctctacaagcaaatctccagtgcttcaacgggggccagcaacgacaaccactacttcggctacagcaccccctgggggtattttgacttcaacagattccactgccacttctcaccacgtgactggcagcgactcatcaacaacaactggggattccgacccaagagactcaacttcaagctctttaacattcaagtcaaggaggtcacgcagaatgaaggcaccaagaccatcgccaataacctcaccagcaccatccaggtgtttacggactcggagtaccagctgccgtacgttctcggctccgcccaccagggctgcctgcctccgttcccggcggacgtgttcatgattccccagtacggctacctaacactcaacaacggtagtcaggccgtgggacgctcctccttctactgcctggaatactttccttcgcagatgctgagaaccggcaacaacttccagtttacttacaccttcgaggacgtgcctttccacagcagctacgcccacagccagagcttggaccggctgatgaatcctctgattgaccagtacctgtactacttgtctcggactcaaacaacaggaggcacggcaaatacgcagactctgggcttcagccaaggtgggcctaatacaatggccaatcaggcaaagaactggctgccaggaccctgttaccgccaacaacgcgtctcaacgacaaccgggcaaaacaacaatagcaactttgcctggactgctgggaccaaataccatctgaatggaagaaattcattggctaatcctggcatcgctatggcaacacacaaagacgacaaggagcgtttttttcccagtaacgggatcctgatttttggcaaacaaaatgctgccagagacaatgcggattacagcgatgtcatgctcaccagcgaggaagaaatcaaaaccactaaccctgtggctacagaggaatacggtatcgtggcagataacttgcagcagcaaaacacggctcctcaaattggaactgtcaacagccagggggccttacccggtatggtctggcagaaccgggacgtgtacctgcagggtcccatctgggccaagattcctcacacggacggcaacttccacccgtctccgctgatgggcggctttggcctgaaacatcctccgcctcagatcctgatcaagaacacgcctgtacctgcggatcctccgaccaccttcaaccagtcaaagctgaactctttcatcacgcaatacagcaccggacaggtcagcgtggaaattgaatgggagctgcagaaagaaaacagcaaacgctggaacccagagattcaatacacttccaactactacaaatctacaagtgtggactttgctgttaatacagaaggcgtgtactctgaaccccaccccattggcacccgttacctcacccgtcccctgtaa

SEQ ID NO: 1111 - DNA, 2211 bp, Artificial Sequence
  Synthetic polynucleotide
atggctgccgatggttatcttccagattggctcgaggacaacctctctgagggcattcgcgagtggtgggcgctgaaacctggagccccgaagcccaaagccaaccagcaaaagcaggacgacggccggggtctggtgcttcctggctacaagtacctcggacccttcaacggactcgacaagggggagccggtcaacgcagcagacgcggcggccctcgagcacgacaaggcctacgaccagcagctcaaggccggagacaacccgtacctcaagtacaaccacgccgacgccgagttccaggagcggctcaaagaagatacgtcttttgggggcaacctcgggcgagcagtcttccaggccaaaaagaggcttcttgaacctcttggtctggttgaggaagcggctaagacggctcctggaaagaagaggcctgtagagcagtctcctcaggaaccggactcctccgcgggtattggcaaatcgggtgcacagcccgctaaaaagagactcaattttggtcagactggcgactcagagtcagtccccgacccacaacctctcggagaacctccagcaacccccgctgctgtgggacctactacaatggcttcaggcggtggcgcaccaatggcagacaataacgaaggcgccgacggagtgggtaatgcctcaggaaattggcattgcgattccacatggctgggcgacagagtcatcaccaccagcacccgaacctgggccctgcccacctacaataaccacctctacaagcaaatctccagtgcttcaacgggggccagcaacgacaaccactacttcggctacagcaccccctgggggtattttgatttcaacagattccactgccacttttcaccacgtgactggcagcgactcatcaacaacaattggggattccggcccaagagactcaacttcaaactcttcaacatccaagtcaaggaggtcacgcagaatgaaggcaccaagaccatcgccaataacctcaccagcaccatccaggtgtttacggactcggagtaccagctgccgtacgttctcggctctgcccaccagggctgcctgcctccgttcccggcggacgtgttcatgattccccagtacggctacctaacactcaacaacggtagtcaggccgtgggacgctcctccttctactgcctggaatactttccttcgcagatgctgagaaccggcaacaacttccagtttacttacaccttcgaggacgtgcctttccacagcagctacgcccacagccagagcttggaccggctgatgaatcctctgattgaccagtacctgtactacttgtctcggactcaaacaacaggaggcacggcaaatacgcagactctgggcttcagccaaggtgggcctaatacaatggccaatcaggcaaagaactggctgccaggaccctgttaccgccaacaacgcgtctcaacgacaaccgggcaaaacaacaatagcaactttgcctggactgctgggaccaaataccatctgaatggaagaaattcattggctaatcctggcatcgctatggcaacacacaaagacgacaaggagcgtttttttcccagtaacgggatcctgatttttggcaaacaaaatgctgccagagacaatgcggattacagcgatgtcatgctcaccagcgaggaagaaatcaaagccactaaccctgtggctacagaggaatacggtatcgtggcagataacttgcagcagcaaaacacggctcctcaaattggaactgtcaacagccagggggccttacccggtatggtttggcagaaccgggacgtgtacctgcagggtcccatctgggccaagattcctcacacggacggcaacttccacccgtctccgctgatgggcggctttggcctgaaacatcctccgcctcagatcctgatcaagaacacgcctgtacctgcggatcctccgaccaccttcaaccagtcaaagctgaactctttcatcacgcaatacagcaccggacaggtcagcgtggaaattgaatgggagctgcagaaggaaaacagcaagcgctggaaccccgagatccagtacacctccaactactacaaatctacaagtgtggactttgctgttaatacagaaggcgtgtactctgaaccccaccccattggcacccgttacctcacccgtcccctgtaa

SEQ ID NO: 1112 - DNA, 2214 bp, Artificial Sequence
  Synthetic polynucleotide
atggctgccgatggttatcttccagattggctcgaggacaacctctctgagggcattcgcgagtggtgggacttgaaacctggagccccgaagcccaaagccaaccagcaaaagcaggacgacggccggggtctggtgcttcctggctacaagtacctcggacccttcaacggactcgacaagggggagcccgtcaacgcggcggacgcagcggccctcgagcacgacaaggcctacgaccagcagctcaaagcgggtgacaatccgtacctgcggtataaccacgccgacgccgagtttcaggagcgtctgcaagaagatacgtcttttgggggcaacctcgggcgagcagtcttccaggccaagaagcgggttctcgaacctctcggtctggttgaggaaggcgctaatacggctcctggaaagaaacgtccggtagagcagtcgccacaagagccagactcctccgcgggtattggcaaatcgggtgcacagcccgctaaaaagagactcaatttcggtcagactggcgacacagagtcagtcccagaccctcaaccaatcggagaacctcccgcagccccctcaggtgtgggatctcttacaatggcttcaggtggtggcgcaccagtggcagacaataacgaaggtgccgatggagtgggtagttcctcgggaaattggcattgcgattcccaatggctgggggacagagtcatcaccaccagcacccgaacctgggccctgcccacctacaacaatcacctctacaagcaaatctccaacagcacatctggaggatcttcaaatgacaacgcctacttcggctacagcaccccctgggggtattttgacttcaacagattccactgccacttctcaccacgtgactggcagcgactcatcaacaacaactggggattccggcctaagcgactcaacttcaagctcttcaacattcaggtcaaagaggttacggacaacaatggagtcaagaccatcgccaataacctcaccagcaccatccaggtgtttacggactcggagtaccagctgccgtacgttctcggctccgcccaccagggctgcctgcctccgttcccggcggacgtgttcatgattccccagtacggctacctaacactcaacaacggtagtcaggccgtgggacgctcctccttctactgcctggaatactttccttcgcagatgctgagaaccggcaacaacttccagtttacttacaccttcgaggacgtgcctttccacagcagctacgcccacagccagagcttggaccggctgatgaatcctctgattgaccagtacctgtactacttgtctcggactcaaacaacaggaggcacggcaaatacgcagactctgggcttcagccaaggtgggcctaatacaatggccaatcaggcaaagaactggctgccaggaccctgttaccgccaacaacgcgtctcaacgacaaccgggcaaaacaacaatagcaactttgcctggactgctgggaccaaataccatctgaatggaagaaattcattggctaatcctggcatcgctatggcctcacacaaagacgacaaggagcgtttttttcccagtaacgggatcctgatttttggcaaacaaaatgctgccagagacaatgcggattacagcgatgtcatgctcaccagcgaggaagaaatcaaaaccactaaccctgtggctacagaggaatacggtatcgtggcagataacttgcagcagcaaaacacggctcctcaaattggaactgtcaacagtcaaggagccttacctggcatggtctggcagaaccgggacgtgtacctgcagggtcccatctgggccaagattcctcacacggacggcaacttccacccgtctccgctgatgggcggctttggcctgaaacatcctccgcctcagatcctgatcaagaacacgcctgtacctgcggatcctccgaccaccttcaaccagtcaaagctgaactctttcatcacgcaatacagcaccggacaggtcagcgtggaaattgaatgggagctgcagaaggaaaacagcaagcgctggaaccccgagatccagtacaccaccaactactacaaatctacaagtgtggactttgctgttaatacagaaggcgtgtactctgaaccccaccccattggcacccgttacctcacccgtcccctgtaa

SEQ ID NO: 1113 - DNA, 2211 bp, Artificial Sequence
  Synthetic polynucleotide
atggctgccgatggttatcttccagattggctcgaggacaacctctctgagggcattcgcgagtggtgggcgctgaaacctggagccccgaagcccaaagccaaccagcaaaagcaggacgacggccggggtctggtgcttcctggctacaagtacctcggacccttcaacggactcgacaaaggagagccggtcaacgaggcggacgcggcagccctcgaacacgacaaagcttacgaccagcagctcaaggccggtgacaatccgtacctgcggtataaccacgccgacgccgagtttcaggagcgtcttcaagaagatacgtcttttgggggcaacctcgggcgagcagtcttccaggccaagaagcgggttctcgaacctctcggtctggttgaggaaggcgctaagacggctcctggaaagaaacgtccggtagagcagtcgccacaagagccagactcctcctcgggcatcggcaagacaggccagcagcccgctaaaaagagactcaattttggtcagactggcgactcagagtcagtccccgacccacaacctctcggagaacctccagcaacccccgctgctgtgggacctactacaatggcttcaggcggtggcgcaccaatggcagacaataacgaaggcgccgacggagtgggtaatgcctcaggaaattggcattgcgattccacatggctgggcgacagagtcatcaccaccagcacccgcacctgggccttgcccacctacaataaccacctctacaagcaaatctccagtgcttcaacgggggccagcaacgacaaccactacttcggctacagcaccccctgggggtattttgactttaacagattccactgccacttttcaccacgtgactggcaaagactcatcaacaacaactggggattccggcccaagagactcaacttcaagctcttcaacatccaggtcaaggaggtcacgcagaatgaaggcaccaagaccatcgccaataaccttaccagcacgattcaggtctttacggactcggaataccagctcccgtacgtcctcggctctgcgcaccagggctgcctccctccgttcccggcggacgtgttcatgattccgcagtacggctacctaacactcaacaacggtagtcaggccgtgggacgctcctccttctactgcctggaatactttccttcgcagatgctgagaaccggcaacaacttccagtttacttacaccttcgaggacgtgcctttccacagcagctacgcccacagccagagcttggaccggctgatgaatcctctgattgaccagtacctgtactacttgtctcggactcaaacaacaggaggcacggcaaatacgcagactctgggcttcagccaaggtgggcctaatacaatggccaatcaggcaaagaactggctgccaggaccctgttaccgccaacaacgcgtctcaacgacaaccgggcaaaacaacaatagcaactttgcctggactgctgggaccaaataccatctgaatggaagaaattcattggctaatcctggcatcgctatggcaacacacaaagacgacaaggagcgtttttttcccagtaacgggatcctgatttttggcaaacaaaatgctgccagagacaatgcggattacagcgatgtcatgctcaccagcgaggaagaaatcaaaaccactaaccctgtggctacagaggaatacggtatcgtggcagataacttgcagcagcaaaacacggctcctcaaattggaactgtcaacagccagggggccttacccggtatggtctggcagaaccgggacgtgtacctgcagggtcccatctgggccaagattcctcacacggacggcaacttccacccgtctccgctgatgggcggctttggcctgaaacatcctccgcctcagatcctgatcaagaacacgcctgtacctgcggatcctccgaccaccttcaaccagtcaaagctgaactctttcatcacgcaatacagcaccggacaggtcagcgtggaaattgaatgggagctgcagaaggaaaacagcaagcgctggaaccccgagatccagtacacctccaactactacaaatctacaagtgtggactttgctgttaatacagaaggcgtgtactctgaaccccaccccattggcacccgttacctcacccgtcccctgtaa

SEQ ID NO: 1114 - DNA, 2211 bp, Artificial Sequence
  Synthetic polynucleotide
atggctgccgatggttatcttccagattggctcgaggacaacctctctgagggcattcgcgagtggtgggcgctgaaacctggagccccgaagcccaaagccaaccagcaaaagcaggacgacggccggggtctggtgcttcctggctacaagtacctcggacccttcaacggactcgacaaaggagagccggtcaacgaggcggacgcggcagccctcgaacacgacaaagcttacgaccagcagctcaaagcgggtgacaatccgtacctgcggtataaccacgccgacgccgagtttcaggagcgtctgcaagaagatacgtcttttgggggcaacctcgggcgagcagtcttccaggccaagaagagggttctcgaaccttttggtctggttgaggaaggtgctaagacggctcctggaaagaaacgtccggtagagcagtcgccacaagagccagactcctcctcgggcattggcaagacaggccagcagcccgctaaaaagagactcaattttggtcagactggcgactcagagtcagtccccgacccacaacctctcggagaacctccagcaacccccgctgctgtgggacctactacaatggcttcaggcggtggcgcaccaatggcagacaataacgaaggcgccgacggagtgggtaatgcctcaggaaattggcattgcgattcccaatggctgggcgacagagtcatcaccaccagcaccagaacctgggccttgcccacctataacaaccacctctacaagcaaatctccagtgcttcaacgggggccagcaacgacaaccactacttcggctacagcaccccctgggggtattttgatttcaacagattccactgccacttctcaccacgtgactggcagcgactcatcaacaacaactggggattccggcctaagcgactcaacttcaagctcttcaacattcaggtcaaagaggttacggacaacaatggagtcaagaccatcgccaataaccttaccagcacggttcaagtcttctcggactcggagtaccagttgccgtacgtcctcggctctgcgcaccagggctgcctccctccgttcccggcggacgtgttcatgattccccagtacggctacctaacactcaacaacggtagtcaggccgtgggacgctcctccttctactgcctggaatactttccttcgcagatgctgagaaccggcaacaacttccagtttacttacaccttcgaggacgtgcctttccacagcagctacgcgcacagccagagcttggaccggctgatgaatcctctgattgaccagtacctgtactacttgtctcggactcaaacaacaggaggcacggcaaatacgcagactctgggcttcagccaaggtgggcctaatacaatggccaatcaggcaaagaactggctgccaggaccctgttaccgccaacaacgcgtctcaacgacaaccgggcaaaacaacaatagcaactttgcctggactgctgggaccaaataccatctgaatggaagaaattcattggctaatcctggcatcgctatggcaacacacaaagacgacaaggagcgtttttttcccagtaacgggatcctgatttttggcaaacaaaatgctgccagagacaatgcggattacagcgatgtcatgctcaccagcgaggaagaaatcaaaaccactaaccctgtggctacagaggaatacggtatcgtggcagataacttgcagcagcaaaacacggctcctcaaattggaactgtcaacagccagggggccttacccggtatggtctggcagaaccgggacgtgtacctgcagggtcccatctgggccaagattcctcacacggacggcaacttccacccgtctccgctgatgggcggctttggcctgaaacatcctccgcctcagatcctgatcaagaacacgcctgtacctgcggatcctccgaccaccttcaaccagtcaaagctgaactctttcatcacgcaatacagcaccggacaggtcagcgtggaaattgaatgggagctgcagaaggaaaacagcaagcgctggaaccccgagatccagtacacctccaactactacaaatctacaagtgtggactttgctgttaatacagaaggcgtgtactctgaaccccaccccattggcacccgttacctcacccgtcccctgtaa

SEQ ID NO: 1115 - DNA, 2244 bp, Artificial Sequence
  Synthetic polynucleotide
  modified_base (2241)..(2241): a, c, t, or g
  misc_feature (2241)..(2241): n is a, c, g, or t
atggctgccgatggttatcttccagattggctcgaggacactctctctgaaggaataagacagtggtggaagctcaaacctggcccaccaccaccaaagcccgcagagcggcataaggacgacagcaggggtcttgtgcttcctgggtacaagtacctcggacccttcaacggactcgacaagggagagccggtcaacgaggcagacgccgcggccctcgagcacgacaaagcctacgaccggcagctcgacagcggagacaacccgtacctcaagtacaaccacgccgacgcggagtttcaggagcgccttaaagaagatacgtcttttgggggcaacctcgggcgagcagtcttccaggccaagaagagggttctcgaaccttttggtctggttgaggaaggtgctaagacggctcctggaaagaaacgtccggtagagcagtcgccacaagagccagactcctcctcgggcattggcaagacaggccagcagcccgctaaaaagagactcaattttggtcagactggcgactcagagtcagtccccgacccacaacctctcggagaacctccagcaacccccgctgctgtgggacctactacaatggcttcaggcggtggcgcaccaatggcagacaataacgaaggcgccgacggagtgggtaatgcctcaggaaattggcattgcgattccacatggctgggcgacagagtcatcaccaccagcacccgaacatgggccttgcccacctataacaaccacctctacaagcaaatctccagtgcttcaacgggggccagcaacgacaaccactacttcggctacagcaccccctgggggtattttgacttcaacagattccactgccacttctcaccacgtgactggcagcgactcatcaacaacaactggggattccggcctaagcgactcaacttcaagctcttcaacattcaggtcaaagaggttacggacaacaatggagtcaagaccatcgccaataaccttaccagcacggtccaggtcttcacggactcagactatcagctcccgtacgtgctcgggtcggctcacgagggctgcctcccgccgttcccagcggacgttttcatgattcctcagtacggctacctaacactcaacaacggtagtcaggccgtgggacgctcctccttctactgcctggaatactttccttcgcagatgctgagaaccggcaacaacttccagtttacttacaccttcgaggacgtgcctttccacagcagctacgcgcacagccagagcttggaccggctgatgaatcctctgattgaccagtacctgtactacttgtctcggactcaaacaacaggaggcacggcaaatacgcagactctgggcttcagccaaggtgggcctaatacaatggccaatcaggcaaagaactggctgccaggaccctgttaccgccaacaacgcgtctcaacgacaaccgggcaaaacaacaatagcaactttgcctggactgctgggaccaaataccatctgaatggaagaaattcattggctaatcctggcatcgctatggcaacacacaaagacgacaaggagcgtttttttcccagtaacgggatcctgatttttggcaaacaaaatgctgccagagacaatgcggattacagcgatgtcatgctcaccagcgaggaagaaatcaaaaccactaaccctgtggctacagaggaatacggtatcgtggcagataacttgcagcagcaaaacacggctcctcaaattggaactgtcaacagccagggggccttacccggtatggtctggcagaaccgggacgtgtacctgcagggtcccatctgggccaagattcctcacacggacggcaacttccacccgtctccgctgatgggcggctttggcctgaaacatcctccgcctcagatcctgatcaagaacacgcctgtacctgcggatcctccgaccaccttcaaccagtcaaagctgaactctttcatcacgcaatacagcaccggacaggtcagcgtggaaattgaatgggagctgcagaaggaaaacagcaagcgctggaaccccgagatccagtacacctccaactactacaaatctacaagtgtggactttgctgttaatacagaaggcgtgtactctgaaccccaccccattggcaccagatacctgactcgtaatctgtaattgcttgttaatcaataaaccgtttaattnttt

SEQ ID NO: 1116 - DNA, 2217 bp, Artificial Sequence
  Synthetic polynucleotide
atggctgccgatggttatcttccagattggctcgaggacaacctctctgagggcattcgcgagtggtgggacttgaaacctggagccccgaaacccaaagccaaccagcaaaagcaggacgacggccggggtctggtgcttcctggctacaagtacctcggacccttcaacggactcgacaagggggagcccgtcaacgcggcggacgcagcggccctcgagcacgacaaggcctacgaccagcagctccaagcgggtgacaatccgtacctgcggtataaccacgccgacgccgagtttcaggagcgtctgcaagaagatacgtcttttgggggcaacctcggacgagcagtcttccaggcgaaaaagagggttctcgaacctctcggtctggttgaggaaggcgctaagacggctcctggaaagaagagaccggtagagccatcaccccagcgttctccagactcctctacgggcatcggcaagaaaggccaacagcccgccagaaaaagactcaattttggtcagactggcgactcagagtcagttccagaccctcaacctctcggagaacctccagcagcgccctctggtgtgggacctaatacaatggctgcaggcggtggcgcaccaatggcagacaataacgaaggcgccgacggagtgggtagttcctcgggaaattggcattgcgattcccaatggctgggggacagagtcatcaccaccagcacccgaacctgggccctgcccacctacaacaatcacctctacaagcaaatctccaacagcacatctggaggatcttcaaatgacaacgcctacttcggctacagcaccccctgggggtattttgacttcaaccgcttccactgccacttctcaccacgtgactggcagcgactcatcaacaacaactggggattccggcccaagagactcagcttcaaactcttcaacatccaggtcaaggaggtcacgcagaatgaaggcaccaagaccatcgccaataacctcaccagcaccatccaggtgtttacggactcggagtaccagctgccgtacgttctcggctctgcccaccagggctgcctgcctccgttcccggcggacgtgttcatgattcctcagtacggctacctaacgctcaacaatggcagccaggcagtgggacggtcatccttttactgcctggaatatttcccatcgcagatgctgagaacgggcaacaactttaccttcagctacacctttgaggacgttcctttccacagcagctacgctcacagccagagtctggaccgtctcatgaatcctctgattgaccagtacctgtactacttgtctcggactcaaacaacaggaggcacggcaaatacgcagactctgggcttcagccaaggtgggcctaatacaatggccaatcaggcaaagaactggctgccaggaccctgttaccgccaacaacgcgtctcaacgacaaccgggcaaaacaacaatagcaactttgcctggactgctgggaccaaataccatctgaatggaagaaattcattggctaatcctggcatcgctatggcaacacacaaagacgacaaggagcgtttttttcccagtaacgggatcctgatttttggcaaacaaaatgctgccagagacaatgcggattacagcgatgtcatgctcaccagcgaggaagaaatcaaaaccactaaccctgtggctacagaggaatacggtatcgtggcagataacttgcagcagcaaaacacggctcctcaaattggaactgtcaacagccagggggccttacccggtatggtctggcagaaccgggacgtgtacctgcagggtcccatctgggccaagattcctcacacggacggcaacttccacccgtctccgctgatgggcggctttggacttaagcacccgcctcctcagatcctcatcaaaaacacgcctgttcctgcggatcctccgaccaccttcaaccagtcaaagctgaactctttcatcacgcaatacagcaccggacaggtcagcgtggaaattgaatgggagctgcagaaggaaaacagcaagcgctggaaccccgagatccagtacacctccaactactacaaatctacaagtgtggactttgctgttaatacagaaggcgtgtactctgaaccccaccccattggcacccgttacctcacccgtcccctgtaa

SEQ ID NO: 1117 - DNA, 2214 bp, Artificial Sequence
  Synthetic polynucleotide
atggctgccgatggttatcttccagattggctcgaggacaacctctctgagggcattcgcgagtggtgggacttgaaacctggagccccgaagcccaaagccaaccagcaaaagcaggacgacggccggggtctggtgcttcctggctacaagtacctcggacccttcaacggactcgacaagggggagcccgtcaacgcggcggatgcagcggccctcgagcacgacaaagcctacgaccagcagctcaaagcgggtgacaatccgtacctgcggtataaccacgccgacgccgagtttcaggagcgtctgcaagaagatacgtcttttgggggcaacctcgggcgagcagtcttccaggccaagaagagggttctcgaaccttttggtctggttgaggaaggtgctaagacggctcctggaaagaaacgtccggtagagcagtcgccacaagagccagactcctcctcgggcattggcaagacaggccagcagcccgctaaaaagagactcaattttggtcagactggcgactcagagtcagtccccgacccacaacctctcggagaacctccagcaacccccgctgctgtgggacctactacaatggcttcaggcggtggcgcacccatgcaagacaataacgaaggcgccgacggagtgggtagttcctcgggaaattggcattgcgattccacatggctgggcgacagagtcatcaccaccagcacccgaacctgggccctgcccacctacaacaaccacctctacaagcaaatctccaacgggacatcgggaggagccaccaacgacaacacctacttcggctacagcaccccctgggggtattttgactttaacagattccactgccacttttcaccacgtgactggcagcgactcatcaacaacaactggggattccggcccaagagactcaacttcaagctcttcaacatccaggtcaaggaggtcacgcagaatgaaggcaccaagaccatcgccaataaccttaccagcacgattcaggtctttacggattcggaataccagctcccgtacgtcctcggctctgcgcaccagggctgcctccctccgttcccggcggacgtgttcatgattccgcagtacggctacctaacgctcaacaatggtagccaggcagtgggacggtcatccttttactgcctggaatatttcccatcgcagatgctgagaacgggcaacaactttaccttcagctacacctttgaggacgttcctttccacagcagctacgctcacagccagagtctggaccgtctcatgaatcctctgattgaccagtacctgtactacttgtctcggactcaaacaacaggaggcacggcaaatacgcagactctgggcttcagccaaggtgggcctaatacaatggccaatcaggcaaagaactggctgccaggaccctgttaccgccaacaacgcgtctcaacgacaaccgggcaaaacaacaatagcaactttgcctggactgctgggaccaaataccatctgaatggaagaaattcattggctaatcctggcatcgctatggcaacacacaaagacgacaaggagcgtttttttcccagtaacgggatcctgatttttggcaaacaaaatgctgccagagacaatgcggattacagcgatgtcatgctcaccagcgaggaagaaatcaaaaccactaaccctgtggctacagaggaatacggtatcgtggcagataacttgcagcagcaaaacacggctcctcaaattggaactgtcaacagccagggggccttacccggtatggtctggcagaaccgggacgtgtacctgcagggtcccatctgggccaagattcctcacacggacggcaacttccacccgtctccgctgatgggcggctttggcctgaaacatcctccgcctcagatcctgatcaagaacacgcctgtacctgcggatcctccgaccaccttcaaccagtcaaagctgaactctttcatcacgcaatacagcaccggacaggtcagcgtggaaattgaatgggagctgcagaaggaaaacagcaagcgctggaaccccgagatccagtacacctccaactactacaaatctacaagtgtggactttgctgttaatacagaaggcgtgtactctgaaccccaccccattggcacccgttacctcacccgtcccctgtaa

SEQ ID NO: 1118 - DNA, 2211 bp, Artificial Sequence
  Synthetic polynucleotide
atggctgccgatggttatcttccagattggctcgaggacaacctctctgagggcattcgcgagtggtgggcgctgaaacctggagccccgaagcccaaagccaaccagcaaaagcaggacgacggccggggtctggtgcttcctggctacaagtacctcggacccttcaacggactcgacaagggggagcccgtcaacgcggcggacgcagcggccctcgagcacgacaaggcctacgaccagcagctcaaagcgggtgacaatccgtacctgcggtataaccacgccgacgccgagtttcaggagcgtctgcaagaagatacgtcttttgggggcaacctcgggcgagcagtcttccaggccaagaagcgggttctcgaacctctcggtctggttgaggaaggcgctaagacggctcctggaaagaaacgtccggtagagcagtcgccacaagagccagactcctcctcgggcatcggcaagacaggccagcagcccgctaaaaagagactcaattttggtcagactggcgactcagagtcagtccccgacccacaacctctcggagaacctccagcaacccccgctgctgtgggacctactacaatggcttcaggcggtggcgcaccaatggcagacaataacgaaggcgccgacggagtgggtagttcctcgggaaattggcattgcgattccacatggctgggcgacagagtcatcaccaccagcacccgcacctgggccttgcccacctacaataaccacctctacaagcaaatctccagtgcttcaacgggggccagcaacgacaaccactacttcggctacagcaccccctgggggtattttgacttcaacagattccactgccacttctcaccacgtgactggcagcgactcatcaacaacaactggggattccggcctaagcgactcaacttcaagctcttcaacattcaggtcaaagaggttacggacaacaatggagtcaagaccatcgccaataaccttaccagcacggtccaggtcttcacggactcagactatcagctcccgtacgtgctcgggtcggctcacgagggctgcctcccgccgttcccagcggacgttttcatgattcctcagtacgggtatctgacgctcaacaatggcagccaggcagtgggacggtcatccttttactgcctggaatatttcccatcgcagatgctgagaacgggcaataactttaccttcagctacaccttcgaggacgtgcctttccacagcagctacgcgcacagccagagcctggaccggctgatgaatcctctgattgaccagtacctgtactacttgtctcggactcaaacaacaggaggcacggcaaatacgcagactctgggcttcagccaaggtgggcctaatacaatggccaatcaggcaaagaactggctgccaggaccctgttaccgccaacaacgcgtctcaacgacaaccgggcaaaacaacaatagcaactttgcctggactgctgggaccaaataccatctgaatggaagaaattcattggctaatcctggcatcgctatggcaacacacaaagacgacaaggagcgtttttttcccagtaacgggatcctgatttttggcaaacaaaatgctgccagagacaatgcggattacagcgatgtcatgctcaccagcgaggaagaaatcaaaaccactaaccctgtggctacagaggaatacggtatcgtggcagataacttgcagcagcaaaacacggctcctcaaattggaactgtcaacagccagggggccttacccggtatggtctggcagaaccgggacgtgtacctgcagggtcccatctgggccaagattcctcacacggacggcaacttccacccgtctccgctgatgggcggctttggcctgaaacatcctccgcctcagatcctgatcaagaacacgcctgtacctgcggatcctccgaccaccttcaaccagtcaaagctgaactctttcatcacgcaatacagcaccggacaggtcagcgtggaaattgaatgggagctgcagaaggaaaacagcaagcgctggaaccccgagatccagtacacctccaactactacaaatctacaagtgtggactttgctgttaatacagaaggcgtgtactctgaaccccaccccattggcacccgttacctcacccgtcccctgtaa

SEQ ID NO: 1119 - DNA, 2214 bp, Artificial Sequence
  Synthetic polynucleotide
atggctgccgatggttatcttccagattggctcgaggacaacctctctgagggcattcgcgagtggtgggacttgaaacctggagccccgaaacccaaagccaaccagcaaaagcaggacgacggccggggtctggtgcttcctggctacaagtacctcggacccttcaacggactcgacaagggggagcccgtcaacgcggcggatgcagcggccctcgagcacgacaaggcctacgaccagcagctcaaagcgggtgacaatccgtacctgcggtataaccacgccgacgccgagtttcaggagcgtctgcaagaagatacgtcttttgggggcaacctcgggcgagcagtcttccaggccaagaagcgggttctcgaacctctcggtctggttgaggaaggcgctaagacggctcctggaaagaagagaccggtagagccatcaccccagcgttctccagactcctctacgggcatcggcaagaaaggccaacagcccgccagaaaaagactcaattttggtcagactggcgactcagagtcagtccccgacccacaacctctcggagaacctccagcaacccccgctgctgtgggacctactacaatggcttcaggcggtggcgcaccaatggcagacaataacgaaggcgccgacggagtgggtaatgcctcaggaaattggcattgcgattccacatggctgggcgacagagtcatcaccaccagcacccgaacatgggccttgcccacctataacaaccacctctacaagcaaatctccagtgcttcaacgggggccagcaacgacaaccactacttcggctacagcaccccctgggggtattttgatttcaacagattccactgccatttctcaccacgtgactggcagcgactcatcaacaacaatttgggatcccggcccaagagactcaacttcaagctcttcatcatccaagtcaaggaggtcacgacgaatgatggcgtcacgaccatcgctaataaccttaccagcacggttcaagtcttctcggactcggagtaccagttgccgtacgtcctcggctctgcgcaccagggctgcctccctccgttcccggcggacgtgttcatgattccgcagtacggctacctaacgctcaacaatggcagccaggcagtgggacggtcatccttttactgcctggaatatttcccatcgcagatgctgagaacgggcaataactttaccttcagctacaccttcgaggacgtgcctttccacagcagctacgcgcacagccagagcctggaccggctgatgaatcctctcatcgaccagtacctgtattacctgaacagaactcagaatcagtccggaagtgcccaaaacaaggacttgctgtttagccgggggtctccagctggcatgtctgttcagcccaaaaactggctacctggaccctgttaccggcagcagcgcgtttctaaaacaaaaacagacaacaacaacagcaactttacctggactggtgcttcaaaatataaccttaatgggcgtgaatctataatcaaccctggcactgctatggcctcacacaaagacgacaaagacaagttctttcccatgagcggtgtcatgatttttggaaaggagagcgccggagcttcaaacactgcattggacaatgtcatgatcacagacgaagaggaaatcaaagccactaaccccgtggccaccgaaagatttgggactgtggcagtcaatctccagagcagcagcacagaccctgcgaccggagatgtgcatgttatgggagccttacctggaatggtgtggcaagacagagacgtatacctgcagggtcctatttgggccaaaattcctcacacggatggacactttcacccgtctcctctcatgggcggctttggacttaagcacccgcctcctcagatcctcatcaaaaacacgcctgttcctgcgaatcctccggcagagttttcggctacaaagtttgcttcattcatcacccagtattccacaggacaagtgagcgtggagattgaatgggagctgcagaaagaaaacagcaaacgctggaatcccgaagtgcagtatacatctaactatgcaaaatctgccaacgttgatttcactgtggacaacaatggactttatactgagcctcgccccattggcacccgttacctcacccgtcccctgtaa

SEQ ID NO: 1120 - DNA, 2211 bp, Artificial Sequence
  Synthetic polynucleotide
atggctgccgatggttatcttccagattggctcgaggacaacctctctgagggcattcgcgagtggtgggcgctgaaacctggagccccgaaacccaaagccaaccagcaaaagcaggacgacggccggggtctggtgcttcctggctacaagtacctcggacccttcaacggactcgacaagggggagcccgtcaacgcggcggacgcagcggccctcgagcacgacaaggcctacgaccagcagctcaaggcgggtgacaatccgtacctgcggtataaccacgccgacgccgagtttcaggagcgtctgcaagaagatacgtcttttgggggcaacctcgggcgagcagtcttccaggccaaaaagaggcttcttgaacctcttggtctggttgaggaagcggctaagacggctcctggaaagaaacgtccggtagagcagtcgccacaagagccagactcctcctcgggcattggcaagacaggccagcagcccgctaaaaagagactcaactttgggcagactggcgactcagagtcagtgcccgaccctcaaccaatcggagaacctccagcaacccccgctgctgtgggacctactacaatggcttcaggcggtggcgcaccaatggcggacaataacgaaggcgccgatggagtgggtaattcctcgggaaattggcattgcgattccacatggctgggcgacagagtcatcaccaccagcacccgaacctgggccctgcccacctacaacaatcacctctacaagcaaatctccagtgcttcaacgggggccagcaacgacaaccactacttcggctacagcaccccctgggggtattttgatttcaacagattccactgccacttttcaccacgtgactggcagcgactcatcaacaacaactggggattccggcccaagagactcaacttcaagctcttcaacatccaggtcaaggaggtcacgcagaatgaaggcaccaagaccatcgccaataacctcaccagcaccatccaggtgtttacggactcggagtaccagctgccgtacgttctcggctccgcccaccagggctgcctgcctccgttcccggcggacgtgttcatgattccgcagtacggctacctaacgctcaacaatggcagccaggcagtgggacggtcatccttttactgcctggaatatttcccatcgcagatgctgagaacgggcaacaactttaccttcagctacacctttgaggacgttcctttccacagcagctacgctcacagccagagtctggaccgtctcatgaatcctctgattgaccagtacctgtactacttgtctcggactcaaacaacaggaggcacggcaaatacgcagactctgggcttcagccaaggtgggcctaatacaatggccaatcaggcaaagaactggctgccaggaccctgttaccgccaacaacgcgtctcaacgacaaccgggcaaaacaacaatagcaactttgcctggactgctgggaccaaataccatctgaatggaagaaattcattggctaatcctggcatcgctatggcaacacacaaagacgacaaggagcgtttttttcccagtaacgggatcctgatttttggcaaacaaaatgctgccagagacaatgcggattacagcgatgtcatgctcaccagcgaggaagaaatcaaaaccactaaccctgtggctacagaggaatacggtatcgtggcagataacttgcagcagcaaaacacggctcctcaaattggaactgtcaacagccagggggccttacccggtatggtctggcagaaccgggacgtgtacctgcagggtcccatctgggccaagattcctcacacggacggcaacttccacccgtctccgctgatgggcggctttggcctgaaacatcctccgcctcagatcctgatcaagaacacgcctgtacctgcggatcctccgaccaccttcaaccagtcaaagctgaactctttcatcacgcaatacagcaccggacaggtcagcgtggaaattgaatgggagctgcagaaggaaaacagcaagcgctggaaccccgagatccagtacacctccaactactacaaatctacaagtgtggactttgctgttaatacagaaggcgtgtactctgatccccaccccattggcacccgttacctcacccgtcccctgtaa

SEQ ID NO: 1121 - DNA, 2211 bp, Artificial Sequence
  Synthetic polynucleotide
atggctgccgatggttatcttccagattggctcgaggacaacctctctgagggcattcgcgagtggtgggcgctgaaacctggagccccgaagcccaaagccaaccagcaagagcaggacgacggccggggtctggtgcttcctggctacaagtacctcggacccttcaacggactcgacaagggagagcccgtcaacgcggcggatgcagcggccctcgagcacgacaaagcctacgaccagcagctcaaagcgggtgacaatccgtacctgcggtataaccacgccgacgccgagtttcaggagcgtctgcaagaagatacgtcttttgggggcaacctcgggcgagcagtcttccaggccaagaagagggttctcgaaccttttggtctggttgaggaaggtgctaagacggctcctggaaagaaacgtccggtagagcagtcgccacaagagccagactcctcctcgggcattggcaagacaggccagcagcccgctaaaaagagactcaattttggtcagactggcgactcagagtcagttccagaccctcaacctctcggagaacctccagcagcgccctctggtgtgggacctaatacaatggctgcaggcggtggcgcaccaatggcagacaataacgaaggcgccgacggagtgggtagttcctcgggaaattggcattgcgattccacatggctgggcgacagagtcatcaccaccagcacccgaacctgggccctgcccacctacaacaaccacctctacaagcaaatctccagtgcttcaacgggggccagcaacgacaaccactacttcggctacagcaccccctgggggtattttgactttaacagattccactgccacttttcaccacgtgactggcagcgactcatcaacaacaactggggattccggcccaagagactcaacttcaagctcttcaacatccaggtcaaggaggtcacgcagaatgaaggcaccaagaccatcgccaataaccttaccagcacgattcaggtctttacggattcggaataccagctcccgtacgtcctcggctctgcgcaccagggctgcctccctccgttcccggcggacgtgttcatgattccgcagtacggctacctaacgctcaacaatggtagccaggcagtgggacggtcatcctttttctgcctggaatatttcccatcgcagatgctgagaacgggcaacaactttaccttcagctacacctttgaggacgttcctttccacagcagctacgctcacagccagagtctggaccgtctcatgaatcctctgattgaccagtacctgtactacttgtctcggactcaaacaacaggaggcacggcaaatacgcagactctgggcttcagccaaggtgggcctaatacaatggccaatcaggcaaagaactggctgccaggaccctgttaccgccaacaacgcgtctcaacgacaaccgggcaaaacaacaatagcaactttgcctggactgctgggaccaaataccatctgaatggaagaaattcattggctaatcctggcatcgctatggcaacacacaaagacgacaaggagcgtttttttcccagtaacgggatcctgatttttggcaaacaaaatgctgccagagacaatgcggattacagcgatgtcatgctcaccagcgaggaagaaatcaaaaccactaaccctgtggctacagaggaatacggtatcgtggcagataacttgcagcagcaaaacacggctcctcaaattggaactgtcaacagccagggggccttacccggtatggtctggcagaaccgagacgtgtacctgcagggtcccatctgggccaagattcctcacacggacggcaacttccacccgtctccgctgatgggcggctttggcctgaaacatcctccgcctcagatcctgatcaagaacacgcctgtacctgcggatcctccgaccaccttcaaccagtcaaagctgaactctttcatcacgcaatacagcaccggacaggtcagcgtggaaattgaatgggagctgcagaaggaaaacagcaagcgctggaaccccgagatccagtacacctccaactactacaaatctacaagtgtggactttgctgttaatacagaaggcgtgtactctgaaccccaccccattggcacccgttacctcacccgtcccctgtaa

SEQ ID NO: 1122 - DNA, 2211 bp, Artificial Sequence
  Synthetic polynucleotide
atggctgccgatggttatcttccagattggctcgaggacaacctctctgagggcattcgcgagtggtgggacttgaaacctggagccccgaagcccaaagccaaccagcaaaagcaggacgacggccggggtctggtgcttcctggctacaagtacctcggacccttcaacggactcgacaagggggagcccgtcaacgcggcggacgcagcggccctcgagcacgacaaggcctacgaccagcagctcaaagcgggtgacaatccgtacctgcggtataaccacgccgacgccgagtttcaggagcgtctgcaagaagatacgtcttttgggggcaacctcgggcgagcagtcttccaggccaagaagcgggttctcgaacctctcggtctggttgaggaaggcgctaagacggctcctggaaagaaacgtccggtagagcagtcaccacaagagccagactcctcctcgggcatcggcaagacaggccagcagcccgctaaaaagagactcaattttggtcagactggcgactcagagtcagtccccgacccacaacctctcggagaacctccagcaacccccgctgctgtgggacctactacaatggcttcaggcggtggcgcaccaatggcggacaataacgaaggcgccgacggagtgggtaatgcctcaggaaattggcattgcgattccacatggctgggcgacagagtcatcaccaccagcacccgaacatgggccttgcccacctataacaaccacctctacaagcaaatctccagtgcttcaacgggggccagcaacgacaaccactacttcggctacagcaccccctgggggtattttgatttcaacagattccactgccatttctcaccacgtgactggcagcgactcatcaacaacaattggggattccggcccaagagactcaacttcaagctcttcaacatccaagtcaaggaggtcacgacgaatgatggcgtcacgaccatcgctaataaccttaccagcacggttcaagtcttctcggactcggagtaccagttgccgtacgtcctcggctctgcgcaccagggctgcctccctccgttcccggcggacgtgttcatgattccgcagtacggctacctaacgctcaacaatggcagccaggcagtgggacggtcatccttttactgcctggaatatttcccatcgcagatgctgagaacgggcaataactttaccttcagctacaccttcgaggacgtgcctttccacagcagctacgcgcacagccagagcctggaccggctgatgaatcctctcatcgaccagtacctgtattacctgaacagaactcagaatcagtccggaagtgcccaaaacaaggacttgctgtttagccgggggtctccagctggcatgtctgttcagcccaaaaactggctacctggaccctgttaccggcagcagcgcgtttctaaaacaaaaacagacaacaacaacagcaactttacctggacaggtgcttcaaaatataaccttaatgggcgtgaatctataatcaaccctggcactgctatggcctcacacaaagacgacaaagacaagttctttcccatgagcggtgtcatgatttttggaaaggagagcgccggagcttcaaacactgcattggacaatgtcatgatcacagacgaagaggaaatcaaagccactaaccccgtggccaccgaaagatttgggactgtggcagtcaatctccagaacagcagcacagaccctgcgaccggagatgtgcatgttatgggagccttacctggaatggtgtggcaagacagagacgtatacctgcagggtcctatttgggccaaaattcctcacacggatggacactttcacccgtctcctctcatgggcggctttggacttaagcacccgcctcctcagatcctcatcaaaaacacgcctgttcctgcgaatcctccggcagagttttcggctacaaagtttgcttcattcatcacccagtattccacaggacaagtgagcgtggagattgaatgggagctgcagaaagaaaacagcaaacgctggaatcccgaagtgcagtatacatctaactatgcaaaatctgccaacgttgatttcactgtagacaacaatggactttatactgtgcctcgccccattggcacccgttacctcacccgtcccctgtaa

SEQ ID NO: 1123 - DNA, 2211 bp, Artificial Sequence
  Synthetic polynucleotide
atggctgccgatggttatcttccagattggctcgaggacaacctctctgagggcattcgcgagtggtgggcgctgaaacctggagccccgaagcccaaagccaaccagcaaaagcaggacgacggccggggtctggtgcttcctggctacaagtacctcggacccttcaacggactcgacaaaggagagccggtcaacgcggcggacgcggcggccctcgaacacgacaaggcttacgaccagcagctcaaggcgggtgacaacccctacctgcggtataaccacgccgacgccgagttccaggagcggctgcaagaagatacgtcttttgggggcaacctcgggcgagcagtcttccaggccaaaaagaggcttcttgaacctcttggtctggttgaggaaggcgctaagacggctcctggaaagaagaggcctgtagagcagtctcctcaagaaccggactcctcctcgggtattggcaaaacaggtgagcagcccgctaaaaagagactcaattttggtcagactggcgactcagagtcagtccccgacccacaacctctcggagaacctccagcaacccccgctgctgtgggacctactacaatggcttcaggcggtggcgcaccaatggcagacaataacgaaggcgccgacggagtgggtagtgcctcaggaaattggcattgcgattccacatggctgggcgacagagtcatcaccaccagcacccgaacctgggccctgcccacctataacaaccatctctacaagcaaatctccagtgcttcaacgggggccagcaacgacaaccactacttcggctacagcaccccctgggggtattttgacttcaacagattccactgccacttctcaccacgtgactggcagcgactcatcaacaacaactggggattccggcctaagcgactcaacttcaagctcttcaacattcaggtcaaagaggttacggacaacaatggagtcaagaccatcgccaataacctcaccagcaccatccaggtgttcacggactcagagtatcagctgccgtacgtgctcgggtcggctcaccagggctgcctccctccgttcccagcggacgtgttcatgattcctcagtacgggtatctgacactcaacaacggcagtcaggcagtgggacggtcatccttctactgcctggaatattttccatcgcagatgctgagaaccggcaacaactttccgttcagttacaccttcgaggacgtgcctttccacagcagctacgcgcacagccagagcctggaccggctgatgaatcctctgattgaccagtacctgtactacttgtctcggactcaaacaacaggaggcacggcaaatacgcagactctgggcttcagccaaggtgggcctaatacaatggccaatcaggcaaagaactggctgccaggaccctgttaccgccaacaacgcgtctcaacgacaaccgggcaaaacaacaatagcaactttgcctggactgctgggaccaaataccatctgaatggaagaaattcattggctaatcctggcatcgctatggcaacacacaaagacgacaaggagcgtttttttcccagtaacgggatcctgatttttggcaaacaaaatgctgccagagacaatgcggattacagcgatgtcatgctcaccagcgaggaagaaatcaaaaccactaaccctgtggctacagaggaatacggtatcgtggcagataacttgcagcagcaaaacacggctcctcaaattggaactgtcaacagccagggggccttacccggtatggtctggcagaaccgggacgtgtacctgcagggtcccatctgggccaagattcctcacacggacggcaacttccacccgtctccgctgatgggcggctttggcctgaaacatcctccgcctcagatcctgatcaagaacacgcctgtacctgcggatcctccgaccaccttcaaccagtcaaagctgaactctttcatcacgcaatacagcaccggacaggtcagcgtggaaattgaatgggagctgcagaaggaaaacagcaagcgctggaaccccgagatccagtacacctccaactactacaaatctacaagtgtggactttgctgttaatacagaaggcgtgtactctgaaccccaccccattggcacccgttacctcacccgtcccctgtaa

SEQ ID NO: 1124 - DNA, 2211 bp, Artificial Sequence
  Synthetic polynucleotide
atggctgccgatggttatcttccagattggctcgaggacaacctctctgagggcattcgcgagtggtgggcgctgaaacctggagccccgaagcccaaagccaaccagcaaaagcaggacgacggccggggtctggtgcttcctggctacaagtacctcggacccttcaacggactcgacaagggggagcccgtcaacgcggcggacgcagcggccctcgagcacgacaaggcctacgaccagcagctcaaagcgggtgacaatccgtacctgcggtataaccacgccgacgccgagtttcaggagcgtctgcaagaagatacgtcttttgggggcaacctcgggcgagcagtcttccaggccaagaagcgggttctcgaacctctcggtctggttgaggaaggcgctaagacggctcctggaaagaaacgtccggtagaacagtcgccacaagagccagactcctcctcgggcatcggcaagacaggccagcagcccgctaaaaagagactcaattttggtcagactggcgactcagagtcagtccccgatccacaacctctcggagaacctccagcaacccccgctgctgtgggacctactacaatggcttcaggcggtggcgcaccaatggcagacaataacgaaggcgccgacggagtgggtagttcctcgggaaattggcattgcgattcccaatggctgggggacagagtcatcaccaccagcacccgaacctgggccctgcccacctacaacaaccacctctacaagcaaatctccagtgcttcaacgggggccagcaacgacaaccactacttcggctacagcaccccctgggggtattttgatttcaacagattccactgccatttctcaccacgtgactggcagcgactcatcaacaacaactggggattccggcctaagcgactcaacttcaagctcttcaacattcaggtcaaagaggttacggacaacaatggagtcaagaccatcgccaataaccttaccagcacggtccaggtcttcacggactcggagtaccagttgccgtacgtcctcggctctgcgcaccaggactgcctccctccgttcccggcggacgtgttcatgattccgcagtacggctacctaacgctcaacaatggcagccaggcagtgggacggtcatccttttactgcctggaatatttcccatcgcagatgctgagaacgggcaacaactttaccttcagctacacctttgaggacgttcctttccacagcagctacgctcacagccagagtctggaccgtctcatgaatcctctgattgaccagtacctgtactacttgtctcggactcaaacaacaggaggcacggcaaatacgcagactctgggcttcagccaaggtgggcctaatacaatggccaatcaggcaaagaactggctgccaggaccctgttaccgccaacaacgcgtctcaacgacaaccggacaaaacaacaatagcaactttgcctggactgctgggaccaaataccatctgaatggaagaaattcattggctaatcctggcatcgctatggcaacacacaaagacgacaaggagcgtttttttcccagtaacgggatcctgatttttggcaaacaaaatgctgccagagacaatgcggattacagcgatgtcatgctcaccagcgaggaagaaatcaaaaccactaaccctgtggctacagaggaatacggtatcgtggcagataacttgcagcagcaaaacacggctcctcaaattggaactgtcaacagccagggggccttacccggtatggtctggcagaaccgggacgtgtacctgcagggtcccatctgggccaagattcctcacacggacggcaacttccacccgtctccgctgatgggcggctttggcctgaaacatcctccgcctcagatcctgatcaagaacacgcctgtacctgcggatcctccgaccaccttcaaccagtcaaagctgaactctttcatcacgcaatacagcaccggacaggtcagcgtggaaattgaatgggagctgcagaaggaaaacagcaagcgctggaaccccgagatccagtacacctccaactactacaaatctacaagtgtggactttgctgttaatacagaaggcgtgtactctgaaccccaccccattggcacccgttacctcacccgtcccctgtaa

SEQ ID NO: 1125 - DNA, 2211 bp, Artificial Sequence
  Synthetic polynucleotide
atggctgccgatggttatcttccagattggctcgaggacaacctctctgagggcattcgcgagtggtgggacttgaaacctggagccccgaagcccaaagccaaccagcaaaagcaggacgacggccggggtctggtgcttcctggctacaagtacctcggacccttcaacggactcgacaagggggagcccgtcaacgcggcggacgcagcggccctcgagcacgacaaggcctacgaccagcagctcaaagcgggtgacaatccgtacctgcggtataaccacgccgacgccgagtttcaggagcgtctgcaagaagatacgtcttttgggggcaacctcgggcgagcagtcttccaggccaagaagcgggttctcgaacctctcggtctggttgaggaaggcgctaagacggctcctggaaagaaacgtccggtagagcagtcaccacaagagccagactcctcctcgggcatcggcaagacaggccagcagcccgctaaaaagagactcaattttggtcagactggcgactcagagtcagtccccgacccacaacctctcggagaacctccagcaacccccgctgctgtgggacctactacaatggcttcaggcggtggcgcaccaatggcagacaataacgaaggtgccgacggagtgggtaatgcctcaggaaattggcattgcgattccacatggctgggcgactgagtcatcaccaccagcacccgcacctgggccttgcccacctacaataaccacctctacaagcaaatctccagtgcttcaacgggggccagcaacgacaaccactacttcggctacagcaccccctgggggtattttgatttcaacagattccactgccacttttcaccacgtgactggcagcgactcatcaacaacaattggggattccggcccaagagactcaacttcaaactcttcaacatccaagtcaaggaggtcacgcagaatgaaggcaccaagaccatcgccaataacctcaccagcaccatccaggtgtttacggactcggagtaccagctgccgtacgttctcggctctgcccaccagggctgcctgcctccgttcccggcggacgtgttcatgattccccagtacggctacctaacgctcaacaatggcagccaggcagtgggacggtcatccttttactgcctggaatactttccttcgcagatgctgagaaccggcaacaacttccagtttacttacaccttcgaggacgtgcctttccacagcagctacgcccacagccagagcttggaccggctgatgaatcctctgattgaccagtacctgtactacttgtctcggactcaaacaacaggaggcacggcaaatacgcagactctgggcttcagccaaggtgggcctaatacaatggccaatcaggcaaagaactggctgccaggaccctgttaccgccaacaacgcgtctcaacgacaaccgggcaaaacaacaatagcaactttgcctggactgctgggaccaaataccatctgaatggaagaaattcattggctaatcctggcatcgctatggcaacacacaaagacgacaaggagcgtttttttcccagtaacgggatcctgatttttggcaaacaaaatgctgccagagacaatgcggattacagcgatgtcatactcaccagcgaggaagaaatcaaaaccactaaccctgtggctacagaggaatacggtatcgtggcagataacttgcagcagcaaaacacggctcctcaaattggaactgtcaacagccagggggccttacccggtatggtctggcagaaccgggacgtgtacctgcagggtcccatctgggccaagattcctcacacggacggcaacttccacccgtctccgctgatgggcggctttggcctgaaacatcctccgcctcagatcctgatcaagaacacgcctgtacctgcggatcctccgaccaccttcaaccagtcaaagctgaactctttcatcacgcaatacagcaccggacaggtcagcgtggaaattgaatgggagctgcagaaggaaaacagcaagcgctggaaccccgagatccagtacacctccaactactacaaatctacaagtgtggactttgctgttaatacagaaggcgtgtactctgaaccccaccccattggcacccgttacctcacccgtcccctgtaa

SEQ ID NO: 1126 - DNA, 2211 bp, Artificial Sequence
  Synthetic polynucleotide
atggctgccgatggttatcttccagattggctcgaggacactctctctgaaggaataagacagtggtggaagctcaaacctggcccaccaccaccaaagcccgcagagcggcataaggacgacagcaggggtcttgtgcttcctgggtacaagtacctcggacccttcaacggactcgacaagggagagccggtcaacgaggcagacgccgcggccctcgagcacgacaaagcctacgaccggcagctcgacagcggagacaacccgtacctcaagtacaaccacgccgacgcggagtttcaggagcgccttaaagaagatacgtcttttgggggcaacctcgggcgagcagtcttccaggccaagaagagggttctcgaaccttttggtctggttgaggaaggtgctaagacggctcctggaaagaaacgtccggtagagcagtcgccacaagagccagactcctcctcgggcattggcaagacaggccagcagcccgctaaaaagagactcaattttggtcagactggcgactcagagtcagtccccgacccacaacctctcggagaacctccagcaacccccgctgctgtgggacctactacaatggcttcaggcggtggcgcaccaatggcagacaataacgaaggcgccgacggagtgggtaatgcctcaggaaattggcattgcgattccacatggctgggcgacagagtcatcaccaccagcacccgaacatgggccttgcccacctataacaaccacctctacaagcaaatctccagtacttcaacgggggccagtaacgacaaccactacttcggctacagcaccccctgggggtattttgacttcaacagattccactgccacttctcaccacgtgactggcagcgactcatcaacaacaactggggattccggcctaagcgactcaacttcaagctcttcaacattcaggtcaaagaggttacggacaacaatggagtcaagaccatcgccaataaccttaccagcacggtccaggtcttcacggactcggagtaccagttgccgtacgtcctcggctctgcgcaccagggctgcctgcctccgttcccggcggacgtgttcatgattccgcagtacggctacctaacgctcaacaatggcagccaggcagtgggacggtcatccttttactgcctggaatatttcccatcgcagatgctgagaacgggcaacaactttaccttcagctacacttttgaggacgttcctttccacagcagctacgctcacagccagagtctggaccgtctcatgaatcctctgattgaccagtacctgtactacttgtctcggactcaaacaacaggaggcacggcaaatacgcagactctgggcttcagccaaggtgggcctaatacaatggccaatcaggcaaagaactggctgccaggaccctgttaccgccaacaacgcgtctcaacgacaaccggacaaaacaacaatagcaactttgcctggactgctgggaccaaataccatctgaatggaagaaattcattggctaatcctggcatcgctatggcaacacacaaagacgacaaggagcgtttttttcccagtaacgggatcctgatttttggcaaacaaaatgctgccagagacaatgcggattacagcgatgtcatgctcaccagcgaggaagaaatcaaaaccactaaccctgtggctacagaggaatacggtatcgtggcagataacttgcagcagcaaaacacggctcctcaaattggaactgtcaacagccagggggccttacccggtatggtctggcagaaccgggacgtgtacctgcagggtcccatctgggccaagattcctcacacggacggcaacttccacccgtctccgctgatgggcggctttggcctgaaacatcctccgcctcagatcctgatcaagaacacgcctgtacctgcggatcctccgaccaccttcaaccagtcaaagctgaactctttcatcacgcaatacagcaccggacaggtcagcgtggaaattgaatgggagctgcagaaggaaaacagcaagcgctggaaccccgagatccagtacacctccaactactacaaatctacaagtgtggactttgctgttaatacagaaggcgtgtactctgaaccccaccccattggcacccgttacctcacccgtcccctgtaa

SEQ ID NO: 1127 - DNA, 2208 bp, Artificial Sequence
  Synthetic polynucleotide
atggctgccgatggttatcttccagattggctcgaggacaacctctctgagggcattcgcgagtggtgggacttgaaacctggagccccgaagcccaaagccaaccagcaaaagcaggacgacggccggggtctggtgcttcctggctacaagtacctcggacccttcaacggactcgacaagggggagcccgtcaacgcggcggatgcagcggccctcgagcacgacaaggcctacgaccggcagctcgacagcggagacaacccgtacctgcggtataaccacgccgacgcggagtttcaggagcgccttaaagaagatacgtcttttgggggcaacctcgggcgagcagtcttccaggccaagaagagggttctcgaaccttttggtctggttgaggaaggtgctaagacggctcctggaaagaaacgtccggtagagcagtcgccacaagagccagactcctcctcgggcattggcaagacaggccagcagcccgctaaaaagagactcaattttggtcagactggcgactcagagtcagtccccgacccacaacctctcggagaacctccagcaacccccgctgctgtgggacctactacaatggcttcaggcggtggcgcaccaatggcagacaataacgaaggcgccgacggagtgggtaatgcctcaggaaattggcattgcgattccacatggctgggcgacagagtcatcaccaccagcacccgcacctgggccttgcccacctacaataaccacctctacaagcaaatctccagtgcttcaacgggggccagcaacgacaaccactacttcggctacagcaccccctgggggtattttgactttaacagattccactgccacttttcaccacgtgactggcaaagactcatcaacaacaactggggattccggcccaagagactcaacttcaagctcttcaacatccaggtcaaggaggtcacgcagaatgaaggcaccaagaccatcgccaataaccttaccagcacgattcaggtctttacggactcggaataccagctcccgtacgtcctcggctctgcgcaccagggctgcctccctccgttcccggcggacgtgttcatgattccgcagtacggctacctaacactcaacaacggtagtcaggccgtgggacgctcctccttctactgcctggaatactttccttcgcagatgctgagaaccggcaacaacttccagtttacttacaccttcgaggacgtgcctttccacagcagctacgcccacagccagagcttggaccggctgatgaatcctctgattgaccagtacctgtactacttgtctcggactcaaacaacaggaggcacggcaaatacgcagactctgggcttcagccaaggtgggcctaatacaatggccaatcaggcaaagaactggctgccaggaccctgttaccgccaacaacgcgtctcaacgacaaccgggcaaaacaacaatagcaactttgcctggactgctgggaccaaataccatctgaatggaagaaattcactggctaatcctggcatcgctatggcaacacacaaagacgacaggagcgtttttttccagtaccgggatcctgattttggcaaacaaaatgctgccagagacaatgcggattacagcgatgtcatgctcaccagcgaggaagaaatcaaaaccactaaccctgtggctacagaggaatacggtatcgtggcagataacttgcagcagcaaaacacggctcctcaaattggaactgtcaacagccagggggccttacccggtatggtctggcagaaccgggacgtgtacctgcagggtcccatctgggccaagattcctcacacggacggcaacttccacccgtctccgctgatgggcggctttggcctgaaacatcctccgcctcagatcctgatcaagaacacgcctgtacctgcggatcctccgaccaccttcaaccagtcaaagctgaactctttcatcacgcaatacagcaccggacaggtcagcgtggaaattgaatgggagctgcagaaggaaaacagcaagcgctggaaccccgagatccagtacacctccaactactacaaatctacaagtgtggactttgctgttaatacagaaggcgtgtactctgaaccccaccccattggcacccgttacctcacccgtcccctgtaa

SEQ ID NO: 1128 - DNA, 2211 bp, Artificial Sequence
  Synthetic polynucleotide
atggctgccgatggttatcttccagattggctcgaggacaacctctctgagggcattcgcgagtggtgggcgctgaaacctggagccccgaagcccaaagccaaccagcaaaagcaggacgacggccggggtctggtgcttcctggctacaagtacctcggacccttcaacggactcgacaagggggagcccgtcaacgcggcggatgcagcagccctcgaacacgacaaagcttacgaccagcagctcaaggccggtgacaacccctacctcaagtataaccacgccgacgccgagtttcaggagcgtcttcaaggagatacgtcttttgggggcaacctcggacgagcagtcttccaggccaagaagcgggttctcgaacctcttggtctggttgaggaagcggctaagacggctcctggaaagaagaggcctgtagagcagtctcctcaggaaccggactcctccgcgggtattggcaaatcgggtgcacagcccgctaaaaagagactcaatttcggtcagactggcgacacagagtcagtcccagaccctcaacctctcggagaacctccagcagcgccctctggtgtgggacctaatacaatggctgcaggcggtggcgcaccaatggcagacaataacgaaggtgccgatggagtgggtagttcctcgggaaattggcattgcgattcccaatggctgggggacagagtcatcaccaccagcacccgaacctgggccctgcccacctacaacaaccacctctacaagcaaatctccagtgcttcaacgggggccagcaacgacaaccactacttcggctacagcaccccttgggggtattttgacttcaacagattccactgccacttttcaccacgtgactggcagcgactcatcaacaacaactggggattccggcctaagcgactcaacttcaagctcttcaacattcaggtcaaagaggttacggacaacaatggagtcaagaccatcgccaataaccttaccagcacggtccaggtcttcacggactcagactatcagctcccgtacgtgctcgggtcggctcacgagggctgcctccctccgttcccggcggacgtgttcatgattccgcagtacggctacctaacgctcaacaatggcagccaggcagtgggacggtcatccttttactgcctggaatactttccttcgcagatgctgagaaccggcaacaacttccagtttacttacaccttcgaggacgtgcctttccacagcagctacgctcacagccagagtctggaccgtctcatgaatcctctgattgaccagtacctgtactacttgtctcggactcaaacaacaggaggcacggcaaatacgcagactctgggcttcagccaaggtgggcctaatacaatggccaatcaggcaaagaactggctgccaggaccctgttaccgccaacaacgcgtctcaacgacaaccgggcaaaacaacaatagcaactttgcctggactgctgggaccaaataccatctgaatggaagaaattcattggctaatcctggcatcgctatggcaacacacaaagacgacaaggagcgtttttttcccagtaacgggatcctgatttttggcaaacaaaatgctgccagagacaatgcggattacagcgatgtcatgctcaccagcgaggaagaaatcaaaaccactaaccctgtggctacagaggaatacggtatcgtagcagataacttgcagcagcaaaacacggctcctcaaattggaactgtcaacagccagggggccttacccggtatggtctggcagaaccgggacgtgtacctgcagggtcccatctgggccaagattcctcacacggacggcaacttccacccgtctccgctgatgggcggctttggcctgaaacatcctccgcctcagatcctgatcaagaacacgcctgtacctgcggatcctccgaccaccttcaaccagtcaaagctgaactctttcatcacgcaatacagcaccggacaggtcagcgtggaaattgaatgggagctgcagaaggaaaacagcaagcgctggaaccccgagatccagtacacctccaactactacaaatctacaagtgtggactttgctgttaatacagaaggcgtgtactctgaaccccaccccattggcacccgttacctcacccgtcccctgtaa

SEQ ID NO: 1129 - DNA, 2211 bp, Artificial Sequence
  Synthetic polynucleotide
atggctgccgatggttatcttccagattggctcgaggacactctctctgaaggaataagacagtggtggaagctcaaacctggcccaccaccaccaaagcccgcagagcggcataaggacgacagcaggggtcttgtgcttcctgggtacaagtacctcggacccttcaacggactcgacaagggagagccggtcaacgaggcagacgccgcggccctcgagcacgacaaagcctacgaccggcagctcgacagcggagacaacccgtacctcaagtacaaccacgccgacgcggagtttcaggagcgccttaaagaagatacgtcttttgggggcaacctcgggcgagcagtcttccaggccaagaagagggttctcgaaccttttggtctggttgaggaagcggctaagacggctcctggaaagaaacgtccggtagagcagtcgccacaagagccagactcctcctcgggcattggcaagacaggccagcagcccgctaaaaagagactcaattttggtcagactggcgactcagagtcagtccccgacccacaacctctcggagaacctccagcaacccccgctgctgtgggacctactacaatggcttcaggcggtggcgcaccaatggcagacaataacgaaggcgccgacggagtgggtaatgcctcaggaaattggcattgcgattccacatggctgggcgacagagtcatcaccaccagcacccgaacatgggccttgcccacctataacaaccacctctacaagcaaatctccagtgcttcaacgggggccagcaacgacaaccactacttcggctacagcaccccctgggggtattttgacttcaacagattccactgccacttctcaccacgtgactggcagcgactcatcaacaacaactggggattccggcctaagcgactcaacttcaagctcttcaacattcaggtcaaagaggttacggacaacaatggagtcaagaccatcgccaataaccttaccagcacggtccaggtcttcacggactcagactatcagctcccgtacgtgctcgggtcggctcacgagggctgcctcccgccgttcccagcggacgttttcatgattcctcagtacggctacctaacactcaacaacggtagtcaggccgtgggacgctcctccttctactgcctggaatactttccttcgcagatgctgagaacgggcaacaactttaccttcagctacacctttgaggacgttcctttccacagcagctacgctcacagccagagtctggaccgtctcatgaatcctctgattgaccagtacctgtactacttgtctcggactcaaacaacaggaggcacggcaaatacgcagactctgggcttcagccaaggtgggcctaatacaatggccaatcaggcaaagaactggctgccaggaccctgttaccgccaacaacgcgtctcaacgacaaccgggcaaaacaacaatagcaactttgcctggactgctgggacaaaataccatctgaatggaagaaattcattggctaatcctggcatcgctatggcaacacacaaagacgacaaggagcgtttttttcccagtaacgggattctgatttttggcaaacaaaatgctgccagagacaatgcggattacagcgatgtcatgctcaccagcgaggaagaaatcaaaaccactaaccctgtggctacagaggaatacggtatcgtggcagataacttgcagcagcaaaacacggctcctcaaattggaactgtcaacagccagggggccttacccggtatggtctggcagaaccgggacgtgtacctgcagggtcccatctgggccaagattcctcacacggacggcaacttccacccgtctccgctgatgggcggctttggacttaagcacccgcctcctcagatcctcatcaaaaacacgcctgttcctgcggatcctccgaccaccttcaaccagtcaaagctgaactctttcatcacgcaatacagcaccggacaggtcagcgtggaaattgaatgggagctgcagaaggaaaacagcaagcgctggaaccccgagatccagtacacctccaactactacaaatctacaagtgtggactttgctgttaatacagaaggcgtgtactctgaaccccaccccattggcacccgttacctcacccgtcccctgtaa

SEQ ID NO: 1130 - DNA, 2211 bp, Artificial Sequence
  Synthetic polynucleotide
atggctgccgatggttatcttccagattggctcgaggacaacctctctgagggcattcgcgagtggtgggcgctgaaacctggagccccgaagcccaaagccaaccagcaaaagcaggacgacggccggggtctggtgcttcctggctacaagtacctcggacccttcaacggactcgacaaaggagagccggtcaacgcggcggacgcagcggccctcgagcacgacaaggcctacgaccagcagctcaaagcgggtgacaatccgtacctgcggtataaccacgccgacgccgagtttcaggagcgtctgcaagaagatacgtcttttgggggcaacctcgggcgagcagtcttccaggccaagaagcgggttctcgaacctctcggtctggttgaggaaggcgctaagacggctcctggaaagaaacgtccggtagagcagtcgccacaagagccagactcctcctcgggcatcggcaagacaggccagcagcccgctaaaaagagactcaattttggtcagactggcgactcagagtcagtccccgacccacaacctctcggagaacctccagcaacccccgctgctgtgggacctactacaatggcttcaggcggtggcgcaccaatggcagacaataacgaaggcgccgacggagtgggtagttcctcgggaaattggcattgcgattccacatggctgggcgacagagtcatcaccaccagcacccgcacctgggccttgcccacctacaataaccacctctacaagcaaatctccagtgcttcaacgggggccagcaacgacaaccactacttcggctacagcaccccctgggggtattttgacttcaacagattccactgccacttctcaccacgtgactggcagcgactcatcaacaacaactggggattccggcctaagcgactcaacttcaagctcttcaacattcaggtcaaagaggttacggacaacaatggagtcaagaccatcgccaataaccttaccagcacggtccaggtcttcacggactcggagtaccagttgccgtacgtcctcggctctgcgcaccagggctgcctccctccgttcccggcggacgtgttcatgattccgcagtacggctacctaacgctcaacaatggcagccaggcagtgggacggtcatccttttactgcctggaatatttcccatcgcagatgctgagaacgggcaacaactttaccttcagctacacctttgaggacgttcctttccacagcagctacgctcacagccagagtctggaccgtctcatgaatcctctgattgaccagtacctgtactacttgtctcggactcaaacaacaggaggcacggcaaatacgcagactctgggcttcagccaaggtgggcctaatacaatggccaatcaggcaaagaactggctgccaggaccctgttaccgccaacaacgcgtctcaacgacaaccgggcaaaacaacaatagcaactttgcctggactgctgggaccaaataccatctgaatggaagaaattcattggctaatcctggcatcgctatggcaacacacaaagacgacaaggagcgtttttttcccagtaacgggatcctgatttttggcaaacaaaatgctgccagagacaatgcggattacagcgatgtcatgctcaccagcgaggaagaaatcaaaaccactaaccctgtggctacagaggaatacggtatcgtggcagataacttgcagcagcaaaacacggctcctcaaattggaactgtcaacagccagggggccttacccggtatggtctggcagaaccgggatgtgtacctgcagggtcccatctgggccaagattcctcacacggacggcaacttccacccgtctccgctgatgggcggctttggcctgaaacatcctccgcctcagatcctgatcaagaacacgcctgtacctgcggatcctccgaccaccttcaaccagtcaaagctgaactctttcatcacgcaatacagcaccggacaggtcagcgtggaaattgaatgggagctgcagaaggaaaacagcaagcgctggaaccccgagatccagtacacctccaactactacaaatctacaagtgtggactttgctgttaatacagaaggcgtgtactctgaaccccaccccattggcacccgttacctcacccgtcccctgtaa

SEQ ID NO: 1131 - DNA, 2214 bp, Artificial Sequence
  Synthetic polynucleotide
atggctgccgatggttatcttccagattggctcgaggacaaccttagtgaaggaattcgcgagtggtgggcgctgaaacctggagccccgaagcccaaagccaaccagcaaaagcaggacgacggccggggtctggtgcttcctggctacaagtacctcggacccttcaacggactcgacaagggggagcccgtcaacgcggcggacgcagcggccctcgagcacgacaaggcctacgaccagcagctcaaagcgggtgacaatccgtacctgcggtataaccacgccgacgccgagtttcaggagcgtctgcaagaagatacgtcttttgggggcaacctcgggcgagcagtcttccaggccaagaagcgggttctcgaacctctcggtctggttgaggaaggcgctaagacggctcctggaaagaaacgtccggtagagcagtcgccacaagagccagactcctcctcgggcatcggcaagacaggccagcagcccgctaaaaagagactcaatttcggtcagactggcgacacagagtcagtcccagaccctcaaccaatcggagaacctcccgcagccccctcaggtgtgggatctcttacaatggcttcaggtggtggcgcaccagtggcagacaataacgaaggtgccgatggagtgggtagttcctcgggaaattggcattgcgattcccaatggctgggggacagagtcatcaccaccagcaccagaacctgggccttgcccacctacaataaccacctctacaagcaaatctccaacagcacatctggaggatcttcaaatgacaacgcctacttcggctacagcaccccctgggggtattttgactttaacagattccactgccacttttcaccacgtgactggcagcgactcatcaacaacaactggggattccgacccaagagactcaacttcaagctcttcaacatccaggtcaaggaggtcacgcagaacgaaggcaccaagaccatcgccaataacctcaccagcaccatccaggtgtttacggactcggagtaccagctgccgtacgttctcggctccgcccaccagggctgcctgcctccgttcccggcggacgtgttcatgattccccagtacggctacctaacgctcaacaacggtagtcaggccgtgggacgctcctccttctactgcctggaatactttccttcgcagatgctgagaaccggcaacaacttccagtttacttacaccttcgaggacgtgcctttccacagcagctacgcgcacagccagagcttggaccggctgatgaatcctctgattgaccagtacctgtactacttgtctcggactcaaacaacaggaggcacggcaaatacgcagactctgggcttcagccaaggtgggcctaatacaatggccaatcaggcaaagaactggctgccaggaccctgttaccgccaacaacgcgtctcaacgacaaccgggcaaaacaacaatagcaactttgcctggactgctgggaccaaataccatctgaatggaagaaattcattggctaatcctggcatcgctatggcaacacacaaagacgacaaggagcgtttttttcccagtaacgggatcctgatttttggcaaacaaaatgctgccagagacaatgcggattacagcgatgtcatgctcaccagcgaggaagaaatcaaaaccactaaccctgtggctacagaggaatacggtatcgtggcagataacttgcagcagcaaaacacggctcctcaaattggaactgtcaacagccagggggccttacccggtatggtctggcagaaccgggacgtgtacctgcagggtcccatctgggccaagattcctcacacggacggcaacttccacccgtctccgctgatgggcggctttggcctgaaacatcctccgcctcagatcctgatcaagaacacgcctgtacctgcggatcctccgaccaccttcaaccagtcaaagctgaactctttcatcacgcaatacagcaccggacaggtcagcgtggaaattgaatgggagctgcagaaggaaaacagcaagcgctggaaccccgagatccagtacacctccaactactacaaatctacaagtgtggactttgctgttaatacagaaggcgtgtactctgaaccccaccccattggcactcgttacctcacccgtcccctgtaa

SEQ ID NO: 1132 - DNA, 2211 bp, Artificial Sequence
  Synthetic polynucleotide
atggctgccgatggttatcttccagattggctcgaggacaacctctctgagggcattcgcgagtggtgggcgctgaaacctggagccccgaagcccaaagccaaccagcaaaagcaggacgacggccggggtctggtgcttcctggctacaagtacctcggacccttcaacggactcgacaagggggagcccgtcaacgcggcggatgcagcagccctcgaacacgacaaagcttacgaccagcagctcaaggccggtgacaacccctacctcaagtataaccacgccgacgccgagtttcaggagcgtcttcaaggagatacgtcttttgggggcaacctcggacgagcagtcttccaggccaagaagcgggttctcgaacctcttggtctggttgaggaagcggctaagacggctcctggaaagaagaggcctgtagagcagtctcctcaggaaccggactcctccgcgggtattggcaaatcgggtgcacagcccgctaaaaagagactcaatttcggtcagactggcgacacagagtcagtcccagaccctcaacctctcggagaacctccagcagcgccctctggtgtgggacctaatacaatggctgcaggcggtggcgcaccaatggcagacaataacgaaggtgccgatggagtgggtagttcctcgggaaattggcattgcgattcccaatggctgggggacagagtcatcaccaccagcacccgaacctgggccctgcccacctacaacaaccacctctacaagcaaatctccagtgcttcaacgggggccagcaacgacaaccactacttcggctacagcaccccttgggggtattttgacttcaacagattccactgccacttctcaccacgtgactggcagcgactcatcaacaacaactggggattccggcctaagcgactcaacttcaagctcttcaacattcaggtcaaagaggttacggacaacaatggagtcaagaccatcgccaataaccttaccagcacggtccaggtcttcacggactcggagtaccagttgccgtacgtcctcggctctgcgcaccagggctgcctccctccgttcccggcggacgtgttcatgattccgcagtacggctacctaacgctcaacaatggcagccaggcagtgggacggtcatccttttactgcctggaatatttcccatcgcagatgctgagaacgggcaacaactttaccttcagctacacctttgaggacgttcctttccacagcagctacgctcacagccagagtctggaccgtctcatgaatcctctgattgaccagtacctgtactacttgtctcggactcaaacaacaggaggcacggcaaatacgcagactctgggcttcagccaaggtgggcctaatacaatggccaatcaggcaaagaactggctgccaggaccctgttaccgccaacaacgcgtctcaacgacaaccgggcaaaacaacaatagcaactttgcctggactgctgggaccaaataccatctgaatggaagaaattcattggctaatcctggcatcgctatggcaacacacaaagacgacaaggagcgtttttttcccagtaacgggatcctgatttttgacaaacaaaatgctgccagagacaatgcggattacagcgatgtcatgctcaccagcgaggaagaaatcaaaaccactaaccctgtggctacagaggaatacggtatcgtggcagataacttgcagcagcaaaacacggctcctcaaattggaactgtcaacagccagggggccttacccggtatggtctggcagaaccgggatgtgtacctgcagggtcccatctgggccaagattcctcacacggacggcaacttccacccgtctccgctgatgggcggctttggcctgaaacatcctccgcctcagatcctgatcaagaacacgcctgtacctgcggatcctccgaccaccttcaaccagtcaaagctgaactctttcatcacgcaatacagcaccggacaggtcagcgtggaaattgaatgggagctgcagaaggaaaacagcaagcgctggaaccccgagatccagtacacctccaactactacaaatctacaagtgtggactttgctgttaatacagaaggcgtgtactctgaaccccaccccattggcacccgttacctcacccgtcccctgtaa

SEQ ID NO: 1133 - DNA, 2211 bp, Artificial Sequence
  Synthetic polynucleotide
atggctgccgatggttatcttccagattggctcgaggacactctctctgaaggaataagacagtggtggaagctcaaacctggcccaccaccaccaaagcccgcagagcggcataaggacgacagcaggggtcttgtgcttcctgggtacaagtacctcggacccttcaacggactcgacaagggagagccggtcaacgaggcagacgccgcggccctcgagcacgacaaagcctacgaccggcagctcgacagcggagacaacccgtacctcaagtacaaccacgccgacgcggagtttcaggagcgccttaaagaagatacgtcttttgggggcaacctcggacgagcagtcttccaggcgaaaaagagggttcttgaacctctgggcctggttgaggaacctgttaagacggctccgggaaaaaagaggccggtagagcactctcctgtggagccagactcctcctcgggaaccggaaaggcgggccagcagcctgcaagaaaaagattgaattttggtcagactggcgactcagagtcagtccccgacccacaacctctcggagaacctccagcaacccccgctgctgtgggacctaatacgatggctacaggcagtggcgcaccaatggcagacaataacgagggcgccgacggagtgggtaattcctcgggaaattggcattgcgattccacatggatgggcgacagagtcatcaccaccagcaccagaacctgggccctgcccacttacaacaaccatctctacaagcaaatctccagtgcttcaacgggggccagcaacgacaaccactacttcggctacagcaccccctgggggtattttgacttcaacagattccactgccacttctcaccacgtgactggcagcgactcatcaacaacaactggggattccggcctaagcgactcaacttcaagctcttcaacattcaggtcaaagaggttacggacaacaatggagtcaagaccatcgccaataaccttaccagcaccatccaggtctttacggactcggaataccagctgccgtacgttctcggctctgcccaccagggctgcctgcctccgttcccggcggacgtgttcatgattccccagtacggctacctaacactcaacaacggtagtcaggccgtgggacgctcctccttctactgcctggaatatttcccatcgcagatgctgagaacgggcaacaactttaccttcagctacacctttgaggacgttcctttccacagcagctacgctcacagccagagtctggaccgtctcatgaatcctctgattgaccagtacctgtactacttgtctcggactcaaacaacaggaggcaaggcaaatacgcagactctgggcttcagccaaggtgggcctaatacaatggccaatcaggcaaagaactggctgccaggaccctgttaccgccaacaacgcgtctcaacgacaaccgggcaaaacaacaatagcaactttgcctggactgctgggaccaaataccatctgaatggaagaaattcattggctaatcctggcatcgctatggcaacacacaaagacgacaaggagcgtttttttcccagtaacgggatcctgatttttggcaaacaaaatgctgccagagacaatgcggattacagcgatgtcatgctcaccagcgaggaagaaatcaaaaccactaaccctgtggctacagaggaatacggtatcgtggcagataacttgcagcagcaaaacacggctcctcaaattggaactgtcaacagccagggggccttacccggtatggtctggcagaaccgggacgtgtacctgcagggtcccatctgggccaagattcctcacacggacggcaacttccacccgtctccgctgatgggcggctttggcctgaaacatcctccgcctcagatcctgatcaagaacacgcctgtacctgcggatcctccgaccaccttcaaccagtcaaagctgaactctttcatcacgcaatacagcaccggacaggtcagcgtggaaattgaatgggagctgcagaaggaaaacagcaagcgctggaaccccgagatccagtacacctccaactactacaaatctacaagtgtggactttgctgttaatacagaaggcgtgtactctgaaccccaccccattggcacccgttacctcacccgtcccctgtaa

SEQ ID NO: 1134 - DNA, 2211 bp, Artificial Sequence
  Synthetic polynucleotide
atggctgccgatggttatcttccagattggctcgaggacaacctctctgagggcattcgcgagtggtgggcgctgaaacctggagccccgaagcccaaagccaaccagcaaaagcaggacgacggccggggtctggtgcttcctggctacaagtacctcggacccttcaacggactcgacaagggggagcccgtcaacgcggcggacgcagcggccctcgagcacgacaaggcctacgaccagcagctcaaagcgggtgacaatccgtacctgcggtataaccacgccgacgccgagtttcaggagcgtctgcaagaagatacgtcttttgggggcaacctcgggcgagcagtcttccaggccaagaagcgggttctcgaaccttttggtctggttgaggaaggtgctaagacggctcctggaaagaaacgtccggtagagcagtcgccacaagagccagactcctcctcgggcatcggcaagacaggccagcagcccgctaaaaagagactcaattttggtcagactggcgactcagagtcagtccccgacccacaacctctcggagaacctccagcaacccccgctgctgtgggacctactacaatggcttcaggcggtggcgcaccaatggcggacaataacgaaggcgccgacggagtgggtaatgcctcaggaaattggcattgcgattccacatggctgggcgacagagtcatcaccaccagcacccgcacctgggccttgcccacctacaataaccacctctacaagcaaatctccagtgcttcaacgggggccagcaacgacaaccactacttcggctacagcaccccctgggggtattttgacttcaacagattccactgccacttttcaccacgtgactggcaaagactcatcaacaacaactggggattccggcctaagcgactcaacttcaagctcttcaacattcaggtcaaagaggttacggacaacaatggagtcaagaccatcgccaataaccttaccagcacggtccaggtcttcacggactcggagtaccagttgccgtacgtcctcggctctgcgcaccagggctgcctccctccgttcccggcggacgtgttcatgattccgcagtacggctacctaacgctcaacaatggcagccaggcagtgggacggtcatccttttactgcctggaatatttcccatcgcagatgctgagaacgggcaacaactttaccttcagctacacctttgaggacgttcctttccacagcagctacgctcacagccagagtctggaccgtctcatgaatcctctgattgaccagtacctgtactacttgtctcggactcaaacaacaggaggcacgggaaatacgcagactctgggcttcagccaaggtgggcctaatacaatggccaatcaggcaaagaactggctgccaggaccctgttaccgccaacaacgcgtctcaacgacaaccgggcaaaacaacaatagcaactttgcctggactgctgggaccaaataccatctgaatggaagaaattcattggctaatcctggcatcgctatggcaacacacaaagacgacaaggagcgtttttttcccagtaacgggatcctgatttttggcaaacaaaatgctgccagagacaatgcggattacagcgatgtcatgctcaccagcgaggaagaaatcaaaaccactaaccctgtggctacagaggaatacggtatcgtggcagataacttgcagcagcaaaacacggctcctcaaattggaactgtcaacagccagggggccttacccggtatggtctggcagaaccgggacgtgtacctgcagggtcccatctgggccaagattcctcacacggacggcaacttccacccgtctccgctgatgggcggctttggcctgaaacatcctccgcctcagatcctgatcaagaacacgcctgtacctgcggatcctccgaccaccttcaaccagtcaaagctgaactctttcatcacgcaatacagcaccggacaggtcagcgtggaaattgaatgggagctgcagaaggaaaacagcaagcgctggaaccccgagatccagtacacctccaactactacaaatctacaagtgtggactttgctgttaatacagaaggcgtgtactctgaaccccaccccattggcacccgttacctcacccgtcccctgtaa

SEQ ID NO: 1135 - DNA, 2211 bp, Artificial Sequence
  Synthetic polynucleotide
atggctgccgatggttatcttccagattggctcgaggacaacctctctgagggcattcgcgagtggtgggacttgaaacctggagccccgaaacccaaagccaaccagcaaaagcaggacgacggccggggtctggtgcttcctggctacaagtacctcggacccttcaacggactcgacaagggggagcccgtcaacgcggcggacgcagcggccctcgagcacgacaaggcctacgaccagcagctcaaagcgggtgacaatccgtacctgcggtataaccacgccgacgccgagtttcaggagcgtctgcaagaagatacgtcttttgggggcaacctcgggcgagcagtcttccaggccaagaagcgggttctcgaacctctcggtctggttgaggaaggcgctaagacggctcctggaaagaagaggcctgtagagcagtcgccacaagagccagactcctcctcgggcatcggcaagacaggccagcagcccgctaaaaagagactcaattttggtcagactggcgactcagagtcagtccccgatccacaacctctcggagaacctccagcaacccccgctgctgtgggacctactacaatggcttcaggcggtggcgcaccaatggcagacaataacgaaggcgccgacggagtgggtagttcctcgggaaattggcattgcgattccacatggctgggcgacagagtcatcaccaccagcacccgaacatgggccttgcccacctataacaaccacctctacaagcaaatctccagtgcttcaacgggggccagcaacgacaaccactacttcggctacagcaccccctgggggtattttgacttcaacagattccactgccacttctcaccacgtgactggcagcgactcatcaacaacaactggggattccggcctaagcgactcaacttcaagctcttcaacatccaggtcaaggaggtcacgcagaatgaaggcaccaagaccatcgccaataacctcaccagcaccatccaggtgtttacggactcggagtaccagcttccgtacgtcctcggctctgcgcaccagggctgcctccctccgttcccggcggacgtgttcatgattccgcagtacggctacctaacgctcaacaatggcagccaggcagtgggacggtcatccttttactgcctggaatatttcccatcgcagatgctgagaacgggcaacaactttaccttcagctacacctttgaggacgttcctttccacagcagctacgcgcacagccagagcttggaccggctgatgaatcctctgattgaccagtacctgtactacttgtctcggactcaaacaacaggaggcacggcaaatacgcagactctgggcttcagccaaggtgggcctaatacaatggccaatcaggcaaagaactggctgccaggaccctgttaccgccaacaacgcgtctcaacgacaaccgggcaaaacaacaatagcaactttgcctggactgctgggaccaaataccatctgaatggaagaaattcattggctaatcctggcatcgctatggcaacacacaaagacgacaaggagcgtttttttcccagtaacgggatcctgatttttggcaaacaaaatgctgccagagacaatgcggattacagcgatgtcatgctcaccagcgaggaagaaatcaaaaccactaaccctgtggctacagaggaatacggtatcgtggcagataacttgcagcagcaaaacacggctcctcaaattggaactgtcaacagccagggggccttacccggtatggtctggcagaaccgggacgtgtacctgcagggtcccatctgggccaagattcctcacacggacggcaacttccacccgtctccgctgatgggcggctttggcctgaaacatcctccgcctcagatcctgatcaagaacacgcctgtacctgcggatcctccgaccaccttcaaccagtcaaagctgaactctttcatcacgcaatacagcaccggacaggtcagcgtggaaattgaatgggagctgcagaaggaaaacagcaagcgctggaaccccgagatccagtacacctccaactactacaaatctacaagtgtggactttgctgttaatacagaaggcgtgtactctgaaccccaccccattggcacccgttacctcacccgtcccctgtaa

SEQ ID NO: 1136 - DNA, 2211 bp, Artificial Sequence
  Synthetic polynucleotide
atggctgccgatggttatcttccagattggctcgaggacaacctctctgagggcattcgcgagtggtgggcgctgaaacctggagccccgaagcccaaagccaaccagcaaaagcaggacgacggccggggtctggtgcttcctggctacaagtacctcggacccttcaacggactcgacaagggggagcccgtcaacgcggcggatgcagcggccctcgagcacgacaaggcctacgaccagcagctcaaagcgggtgacaatccgtacctgcggtataaccacgccgacgccgagtttcaggagcgtctgcaagaagatacgtcttttgggggcaacctcgggcgagcagtcttccaggccaagaagcgggttctcgaacctctcggtctggttgaggaaggcgctaagacggctcctggaaagaaacgtccggtagagcagtcgccacaagagccagactcctcctcgggcatcggcaagacaggccagcagcccgctaaaaagagactcaattttggtcagactggcgactcagagtcagtccccgacccacaacctctcggagaacctccagcaacccccgctgctgtgggacctactacaatggctgcaggcggtggcgcaccaatggcagacaataacgaaggcgccgacggagtgggtagttcctcgggaaattggcattgcgattccacatggatgggcgacagagtcatcaccaccagcacccgaacctgggccttgcccacctataacaaccatctctacaagcaaatctccagtgcttcaacgggggccagcaacgacaaccactacttcggctacagcaccccctgggggtattttgacttcaacagattccactgccacttctcaccacgtgactggcagcgactcatcaacaacaactggggattccggcccaagagactcagcttcaagctcttcaacatccaggtcaaggaggtcacgcagaatgaaggcaccaagaccatcgccaataacctcaccagcaccatccaggtgtttacggactcggagtaccagctgccgtacgtcctcggctctgcgcaccagggctgcctccctccgttcccggcggacgtgttcatgattccgcagtacggctacctaacgctcaacaatggcagccaggcagtgggacggtcatccttttactgcctggaatatttcccatcgcagatgctgagaacgggcaacaactttaccttcagctacacctttgaggacgttcctttccacagcagctacgctcacagccagagcttggaccggctgatgaatcctctgattgaccagtacctgtactacttgtctcggactcaaacaacaggaggcacggcaaatacgcagactctgggtttcagccaaggtgggcctaatacaatggccaatcaggcaaagaactggctgcaaggaccctgttaccgccaacaacgcgtctcaacgacaaccgggcaaaacaacaatagcaactttgcctggactgctgggaccaaataccatctgaatggaagaaattcattggctaatcctggcatcgctatggcaacacacaaagacgacaaggagcgtttttttcccagtaacgggatcctgatttttggcaaacaaaatgctgccagagacaatgcggattacagcgatgtcatgctcaccagcgaggaagaaatcaaaaccactaaccctgtggctacagaggaatacggtatcgtggcagataacttgcagcagcaaaacacggctcctcaaattggaactgtcaacagccagggggccttacccggtatggtctggcagaacctggacgtgtacctgcagggtcccatctgggccaagattcctcacacggacggcaacttccacccgtctccgctgatgggcggctttggcctgaaacatcctccgcctcagatcctgatcaagaacacgcctgtacctgcggatcctccgaccaccttcaaccagtcaaagctgaactctttcatcacgcaatacagcaccggacaggtcagcgtggaaattgaatgggagctgcagaaggaaaacagcaagcgctggaaccccgagatccagtacacctccaactactacaaatctacaagtgtggactttgctgttaatacagaaggcgtgtactctgaaccccaccccattggcacccgttacctcacccgtcccctgtaa

SEQ ID NO: 1137 - DNA, 2214 bp, Artificial Sequence
  Synthetic polynucleotide
atggctgccgatggttatcttccagattggctcgaggacaacctctctgagggcattcgcgagtggtgggcgctgaaacctggagccccgaagcccaaagccaaccagcaaaagcaggacgacggccggggtctggtgcttcctggctacaagtacctcggacccttcaacggactcgacaagggagagcccgtcaacgcggcggacgcagcggccctcgagcacgacaaggcctacgaccagcagctcaaagcgggtgacaatccgtacctgcggtataaccacgccgacgccgagtttcaggagcgtctgcaagaagatacgtcttttgggggcaacctcgggcgagcagtcttccaggccaagaagcgggttctcgaacctctcggtctggttgaggaaggcgctaagacggctcctggaaagaagagaccggtagagccatcaccccagcgttctccagactcctcctcgggcatcggcaagacaggccagcagcccgctaaaaagagactcaattttggtcagactggcgactcagagtcagtccccgacccacaacctctcggagaacctccagcaacccccgctgctgtgggacctactacaatggcttcaggtggtggcgcaccaatggcagacaataacgaaggcgccgacggagtgggtaatgcctcaggaaattggcattgcgattcccaatggctgggcgacagagtcatcaccaccagcacccgaacatgggccttgcccacctataacaaccacctctacaagcaaatctccagtgcttcaacgggggccagcaacgacaaccactacttcggctacagcaccccctgggggtattttgacttcaacagattccactgccacttttcaccacgtgactggcagcgactcatcaacaacaactggggattccggcctaagcgactcaacttcaagctcttcaacattcaggtcaaagaggttacggacaacaatggagtcaagaccatcgccaataaccttaccagcacggtccaggtcttcacggactcagactatcagctcccgtacgtgctcgggtcggctcacgagggctgcctcccgccgttcccagcggacgttttcatgattccccagtacggctacctaacactcaacaacggtagtcaggccgtgggacgctcctccttctactgcctggaatactttccttcgcagatgctgagaaccggcaacaacttccagtttacttacaccttcgaggacgtgcctttccacagcagctacgctcacagccagagcttggaccggctgatgaatcctctgattgaccagtacctgtactacttgtctcggactcaaacaacaggaggcacggcaaatacgcagactttgggcttcagccaaggtgggcctaatacaatggccaatcaggcaaagaactgggtgccaggaccctgttaccgccaacaacgggtttcaacggcaaccgggcaaaacaacaatagcaactttgcctggactgctgggaccaaataccatctgaaaggaagaaattcattggctaatcctggcatcgctatggcaacacacaaagacgacaaggagcgtttttttcccagtaacgggatcctgatttttggcaaacaaaatgctgccagagacaatgcggattacagcgatgtcatgctcaccagcgaggaagaaatcaaaaccactaaccctgtggctacagaggaatacggtatcgtggcagataacttgcagcagcaaaacacggctcctcaaattggaactgtcaacagccagggggccttacccggtatggtctggcagaaccgggacgtgtacctgcagggtcccatctgggccaagattcctcacacggacggcaacttccacccgtctccgctgatgggcggctttggcctgaaacatcctccgcctcagatcctgatcaagaacacgcctgtacctgcggatcctccgaccaccttcaaccagtcaaagctgaactctttcatcacgcaatacagcaccggacaggtcagcgtggaaattgaatgggagctgcagaaggaaaacagcaaacgctggaacccagagattcaatacacttccaactactacaaatctacaagtgtggactttgctgttaatacagaaggcgtgtactctgaaccccaccccattggcacccgttacctcacccgtcccctgtaa

SEQ ID NO: 1138 - DNA, 2214 bp, Artificial Sequence
  Synthetic polynucleotide
  modified_base (676)..(676): a, c, t, or g
  misc_feature (676)..(676): n is a, c, g, or t
  modified_base (697)..(697): a, c, t, or g
  misc_feature (697)..(697): n is a, c, g, or t
  modified_base (715)..(715): a, c, t, or g
  misc_feature (715)..(715): n is a, c, g, or t
  modified_base (748)..(748): a, c, t, or g
  misc_feature (748)..(748): n is a, c, g, or t
  modified_base (750)..(750): a, c, t, or g
  misc_feature (750)..(750): n is a, c, g, or t
  modified_base (757)..(757): a, c, t, or g
  misc_feature (757)..(757): n is a, c, g, or t
  modified_base (763)..(763): a, c, t, or g
  misc_feature (763)..(763): n is a, c, g, or t
atggctgccgatggttatcttccagattggctcgaggacactctctctgaaggaataagacagtggtggaagctcaaacctggcccaccaccaccaaagcccgcagagcggcataaggacgacagcaggggtcttgtgcttcctgggtacaagtacctcggacccttcaacggactcgacaagggagagccggtcaacgaggcagacgccgcggccctcgagcacgacaaagcctacgaccggcagctcgacagcggagacaacccgtacctcaagtacaaccacgccgacgcggagtttcaggagcgccttaaagaagatacgtcttttgggggcaacctcggacgagcagtcttccaggcgaaaaagagggttcttgaacctctcggtctggttgaggaaggcgctaagacggctcctggaaagaaacgtccggtagagcagtcgccacaagagccagactcctcctcgggcatcggcaagacaggccagcagcccgctaaaaagagactcaattttggtcagactggcgactcagagtcagtccccgacccacaacctctcggagaacctccagcaacgccctctggtgtgggacctaatacaatggctgcaggcggtggcgctccaatggcagacaataacgaaggcgccgacggagtgggtagttcctcangaaattggcattgcgattccncatggctgggcgacagantcatcaccaccagcacccgaacctgggccctgncnacctacnacaacnacctctacaagcaaatctccaacagcacatctggaggagccaccaacgacaacacctacttcggctacagcaccccctgggggtattttgactttaacagattccactgccacttttcaccacgtgactggcagcgactcatcaacaacaactggggattccggcctaagcgactcaacttcaagctcttcaacatccaggtcaaggaggtcacgcagaatgaaggcaccaagaccatcgccaataacctcaccagcaccatccaggtgtttacggactcggagtaccagctgccgtacgttctcggctctgcccaccagggctgcctgcctccgttcccggcggacgtgttcatgattccccagtacggctacctaacactcaacaacggtagtcaggccgtgggacgctcctccttctactgcctggaatactttccttcgcagatgctgagaaccggcaacaacttccagtttacttacaccttcgaggacgtgcctttccacagcagctacgcccacagccagagcttggaccggctgatgaatcctctgattgaccagtacctgtactacttgtctcggactcaaacaacaggaggcacggcaaatacgcagactctgggcttcagccaaggtgggcctaatacaatggccaatcaggcaaagaactggctgccaggaccctgttaccgccaacaacgcgtctcaacgacaaccgggcaaaacaacaatagcaactttgcctggactgctgggaccaaataccatctgaatggaagaaattcattggctaatcctggcatcgctatggcaacacacaaagacgacaaggagcgtttttttcccagtaacgggatcctgatttttggcaaacaaaatgctgccagagacaatgcggattacagcgatgtcatgctcaccagcgaggaagaaatcaaaaccactaaccctgtggctacagaggaatacggtatcgtggcagataacttgcagcagcaaaacacggctcctcaaattggaactgtcaacagccagggggccttacccggtatggtttggcagaaccgggacgtgtacctgcagggtcctatctgggccaagattcctcacacggacggaaactttcatccctcgccgctgatgggaggctttggactgaaacacccgcctcctcagatcctgattaagaatacacctgttcccgcggatcctccaactaccttcagtcaagctaagctggcgtcgttcatcacgcaatacagcacaggacaagtgagtgtggaaattgaatgggagctgcagaaagaaaacagcaagcgctggaatcccgaagtgcagtacacatccaattatgcaaaatctgccaacgttgattttactgtggacaacaatggactttatactgagcctcgccccattggcacccgttaccttacccgtcccctgtaa

SEQ ID NO: 1139 - DNA, 2214 bp, Artificial Sequence
  Synthetic polynucleotide
atggctgccgatggttatcttccagattggctcgaggacaacctctctgagggcattcgcgagtggtgggacttgaaacctggagccccgaagcccaaagccaaccagcaaaagcaggacgacggccggggtctggtgcttcctggctacaagtacctcggacccttcaacggactcgacaagggggagcccgtcaacgcggcggacgcagcggccctcgagcacgacaaggcctacgaccagcagctcaaagcgggtgacaatccgtacctgcggtataaccacgccgacgccgagtttcaggagcgtctgcaagaagatacgtcttttgggggcaacctcgggcgagcagtcttccaggccaagaagcgggttctcgaacctctcggtctggttgaggaaggcgctaagacggctcctggaaagaagagaccggtagagccatcaccccagcgttctccagactcctctacgggcatcggcaagaaaggccagcagcccgcgaaaaagagactcaactttgggcagactggcgactcagagtcagtgcccgaccctcaaccaatcggagaaccccccgcaggcccctctggtgtgggatctcttacaatggcttcaggtggtggcgcaccagtggcagacaataacgaaggtgccgatggagtgggtagttcctcgggaaattggcattgcgattcccaatggctgggggacagagtcatcaccaccagcacccgaacatgggccttgcccacctataacaaccacctctacaagcaaatctccagtgcttcaacgggggccagcaacgacaaccactacttcggctacagcaccccctgggggtattttgactttaacagattccactgccacttctcaccacgtgactggcagcgactcatcaacaacaactggggattccggcccaagagactcaacttcaagctcttcaacatccaggtcaaggaggtcacggacaatgatggagtcaagaccatcgccaataaccttaccagcacgattcaggtctttacggactcggaataccagttgccgtacgtcctcggctctgcgcaccagggctgcctgcctccgttcccggcggacgtgttcatgattccgcagtacggctacctaacgctcaacaatggcagccaggcagtgggacggtcatccttttactgcctggaatatttcccatcgcagatgctgagaacgggcaacaactttaccttcagctacacttttgaggacgttcctttccacagcagctacgctcacagccagagtctggaccgtctcatgaatcctctgattgaccagtacctgtactacttgtctcggactcaaacaacaggaggcacggcaaatacgcagactctgggcttcagccaaggtgggcctaatacaatggccaatcacgcaaagaactggctgccaggaccctgttaccgccaacaacgcgtctcaacgacaaccggacaaaacaacaatagcaactttgcctggactgctgggaccaaataccatctgaatggaagaaattcattggctaatcctggcatcgctatggcaacacacaaagacgacaaggagcgtttttttcccagtaacgggatcctgatttttggcaaacaaaatgctgccagagacaatgcggattacagcgatgtcatgctcaccagcgaggaagaaatcaaaaccactaaccctgtggctacagaggaatacggtatcgtggcagataacttgcagcagcaaaacacggctcctcaaattggaactgtcaacagccagggggccttacccggtatggtctggcagaaccgggacgtgtacctgcagggtcccatctgggccaagattcctcacacggacggcaacttccacccgtctccgctgatgggcggctttggcctgaaacatcctccgcctcagatcctgatcaagaacacgcctgtacctgcggatcctccgaccaccttcaaccagtcaaagctgaactctttcatcacgcaatacagcaccggacaggtcagcgtggaaattgaatgggagctgcagaaggaaaacagcaagcgctggaaccccgagatccagtacacctccaactactacaaatctacaagtgtggactttgctgttaatacagaaggcgtgtactctgaaccccaccccattggcacccgttacctcacccgtcccctgtaa

SEQ ID NO: 1140 - DNA, 2211 bp, Artificial Sequence
  Synthetic polynucleotide
atggctgccgatggttatcttccagattggctcgaggacactctctctgaaggaataagacagtggtggaagctcaaacctggcccaccaccaccaaagcccgcagagcggcacaaggacgacagcaggggtcttgtgcttcctgggtacaagtacctcggacccttcaacggactcgacaagggagagccggtcaacgaggcagacgccgcggccctcgagcacgacaaagcctacgaccggcagctcgacagcggagacaacccgtacctcaagtacaaccacgccgacgcggagtttcaggagcgccttaaagaagatacgtcttttgggggcaacctcggacgagcagtcttccaggcgaaaaagagggttcttgaacctctgggcctggttgaggaacctgttaagacggctccgggaaaaaagaggccggtagagcactctcctgtggagccagactcctcctcgggaaccggaaaggcgggccagcagcctgctaaaaagagactcaattttggtcagactggcgactcagagtcagtccccgacccacaacctctcggagaacctccagcaacccccgctgctgtgggacctactacaatggcttcaggtggtggcgcaccaatggcagacaataacgaaggcgccgacggagtgggtaatgcctcaggaaattggcattgcgattccacatggctgggcgacagagtcatcaccaccagcacccgcacctgggccttgcccacctacaataaccacctctacaagcaaatctccagtgcttcaacgggggccagcaacgacaaccactacttcggctacagcaccccctgggggtattttgacttcaacagattccactgccacttctcaccacgtgactggcagcgactcatcaacaacaactggggattccggcccaagagactcaacttcaaactcttcaacatccaagtcaaggaggtcacgcagaatgaaggcaccaagaccatcgccaataacctcaccagcaccatccaggtgtttacggactcggagtaccagctgccgtacgttctcggctctgcccaccagggctgcctgcctccgttcccggcggacgtgttcatgattccccagtacggctacctaacactcaacaacggtagtcaggccgtgggacgctcctccttctactgcctggaatactttccttcgcagatgctgagaaccggcaacaacttccagtttacttacaccttcgaggacgtgcctttccacagcagctacgcgcacagccagagcttggaccggctgatgaatcctctgattgaccagtacctgtactacttgtctcggactcaaacaacaggaggcacggcaaatacgcagactctgggcttcagccaaggtgggcctaatacaatggccaatcaggcaaagaactggctgccaggaccctgttaccgccaacaacgcgtctcaacgacaaccgggcaaaacaacaatagcaactttgcctggactgctgggaccaaataccatctgaatggaagaaattcattggctaatcctggcatcgctatggcaacacacaaagacgacaaggagcgtttttttcccagtaacgggatcctgatttttggcaaacaaaatgctgccagagacaatgcggattacagcgatgtcatgctcaccagcgaggaagaaatcaaaaccactaaccctgtggctacagaggaatacggtatcgtggcagataacttgcagcagcaaaacacggctcctcaaattggaactgtcaacagccagggggccttacccggtatggtctggcagaaccgggacgtgtacctgcagggtcccatctgggccaagattcctcacacggacggcaacttccacccgtctccgctgatgggcggctttggcctgaaacatcctccgcctcagatcctgatcaagaacacgcctgtacctgcggatcctccgaccaccttcaaccagtcaaagctgaactctttcatcacgcaatacagcaccggacaggtcagcgtggaaattgaatgggagctgcagaaggaaaacagcaagcgctggaaccccgagatccagtacacctccaactactacaaatctacaagtgtggactttgctgttaatacagaaggcgtgtactctgaaccccaccccattggcacccgttacctcacccgtcccctgtaa

SEQ ID NO: 1141 - DNA, 2211 bp, Artificial Sequence
  Synthetic polynucleotide
atggctgccgatggttatcttccagattggctcgaggacaacctctctgagggcattcgcgagtggtgggcgctgaaacctggagccccgaagcccaaagccaaccagcaaaagcaggacgacggccggggtctggtgcttcctggctacaagtacctcggacccttcaacggactcgacaagggggagcccgtcaacgcggcggatgcagcggccctcgagcacgacaaggcctacgaccagcagctccaagcgggtgacaatccgtacctgcggtataaccacgccgacgccgagtttcaggagcgtcttcaaggagatacgtcttttgggggcaacctcggacgagcagtcttccaggccaagaagcgggttctcgaacctctcggtctggttgaggaaggcgctaagacggctcctggaaagaaacgtccggtagagcagtcgccacaagagccagactcctcctcgggcatcggcaagacaggccagcagcccgctaaaaagagactcaattttggtcagactggcgactcagagtcagtccccgacccacaacctctcggagaacctccagcaacccccgctgctgtgggacctactacaatggcttcaggcggtggcgcaccaatggcggacaataacgaaggcgccgatggagtgggtaatgcctcaggaaattggcattgcgattccacatggctgggcgacagagtcatcaccaccagcacccgcacctgggccttgcccacctacaataaccacctctacaagcaaatctccagtgcttcaacgggggccagcaacgacaaccactacttcggctacagcaccccctgggggtattttgacttcaacagattccactgccacttctcaccacgtgactggcagcgactcatcaacaacaactggggattccggcctaagcgactcaacttcaagctcttcaacattcaggtcaaagaggttacggacaacaatggagtcaagaccatcgccaataacctcaccagcaccatccaggtgtttacggactcggagtaccagctgccgtacgttctcggctctgcccaccagggctgcctgcctccgttcccggcggacgtgttcatgattccccagtacggctacctaacactcaacaacggtagtcaggccgtgggacgctcctccttctactgcctggaatactttccttcgcagatgctgagaaccggcaacaacttccagtttacttacaccttcgaggacgtgcctttccacagcagctacgcccacagccagagcttggaccggctgatgaatcctctgattgaccagtacctgtactacttgtctcggactcaaacaacaggaggcacggcaaatacgcagactctgggcttcagccaaggtgggcctaatacaatggccaatcaggcaaagaactggctgccaggaccctgttaccgccaacaacgcgtctcaacgacaaccgggcaaaacaacaatagcaactttgcctggactgctgggaccaaataccatctgaatggaagaaattcattggctaatcctggcatcgctatggcaacacacaaagacgacaaggagcgtttttttcccagtaacgggatcctgatttttggcaaacaaaatgctgccagagacaatgcggattacagcgatgtcatgctcaccagcgaggaagaaatcaaaaccactaaccctgtggctacagaggaatacggtatcgtggcagataacttgcagcagcaaaacacggctcctcaaattggaactgtcaacagccagggggccttacccggtatggtctggcagaaccgggacgtgtacctgcagggtcccatctgggccaagattcctcacacggacggcaacttccacccgtctccgctgatgggcggctttggcctgaaacatcctccgcctcagatcctgatcaagaacacgcctgtacctgcggatcctccgaccaccttcaaccagtcaaagctgaactctttcatcacgcaatacagcaccggacaggtcagcgtggaaattgaatgggagctgcagaaggaaaacagcaagcgctggaaccccgagatccagtacacctccaactactacaaatctacaagtgtggactttgctgttaatacagaaggcgtgtactctgaaccccaccccattggcacccgttacctcacccgtcccctgtaa

SEQ ID NO: 1142 - DNA, 2217 bp, Artificial Sequence
  Synthetic polynucleotide
atggctgccgatggttatcttccagattggctcgaggacactctctctgaaggaataagacagtggtggaagctcaaacctggcccaccaccaccaaagcccgcagagcggcataaggacgacagcaggggtcttgtgcttcctgggtacaagtacctcggacccttcaacggactcgacaagggggagcccgtcaacgcggcggatgcagcggccctcgagcacgacaaggcctacgaccagcagctcaaagcgggtgacaatccgtacctgcggtataaccacgccgacgcggagtttcaggagcgccttaaagaagatacgtcttttgggggcaacctcggacgagcagtcttccaggcgaaaaagagggttcttgaacctctcggtctggttgaggaaggcgctaagacggctcctggaaagaagagaccggtagagccatcaccccagcgttctccagactcctctacgggcatcggcaagaaaggccaacagcccgccagaaaaagactcaattttggtcagactggcgactcagagtcagttccagaccctcaacctctcggagaacctccagcagcgccctctggtgtgggacctaatacaatggctgcaggcggtggcgcaccaatggcagacaataacgaaggcgccgacggagtgggtagttcctcgggaaattggcattgcgattcccaatggctgggggacagagtcatcaccaccagcaccagaacctgggccctgcccacctacaacaatcacctctacaagcaaatctccaacagcacatctggaggatcttcaaatgacaacgcctacttcggctacagcaccccctgggggtattttgacttcaaccgcttccactgccacttctcaccacgtgactggcagcgactcatcaacaacaactggggattccggcccaagagactcaacttcaagctcttcaacattcaggtcaaagaggttacggacaacaatggagtcaagaccatcgccaataaccttaccagcacggtccaggtctttacggactcggagtaccagttgccgtacgtcctcggctctgcgcaccagggctgcctccctccgttcccggcggacgtgttcatgattccccagtacggctacctaacactcaacaacggtagtcaggccgtgggacgctcctccttctactgcctggaatatttcccttctcagatgctgagaacgggcaacaactttaccttcagctacacctttgaggacgttcctttccacagcagctacgctcacagccagagtctggaccgtctcatgaatcctctgattgaccagtacctgtactacttgtctcggactcaaacaacaggaggcacggcaaatacgcagactctgggcttcagccaaggtgggcctaatacaatggccaatcaggcaaagaactggctgccaggaccctgttaccgccaacaacgcgtctcaacgacaaccgggcaaaacaacaatagcaactttgcctggactgctgggaccaaataccatctgaatggaagaaattcattggctaatcctggcatcgctatggcaacacacaaagacgacaaggagcgtttttttcccagtaacgggatcctgatttttggcaaacaaaatgctgccagagacaatgcggattacagcgatgtcatgctcaccagcgaggaagaaatcaaaaccactaaccctgtggctacagaggaatacggtatcgtggcagataacttgcagcagcaaaacacggctcctcaaattggaactgtcaacagccagggggccttacccggtatggtctggcagaaccgggacgtgtacctgcagggtcccatctgggcaaagattccacacacggacggacattttcacccctctcccctcatgggtggattcggacttaaacaccctcctccacagattctcatcaagaacaccccggtacctgcgaatcctccgaccaccttcaaccagtcaaagctgaactctttcatcacgcaatacagcacaggacaagtgagtgtggaaattgaatgggagctgcagaaagaaaacagcaagcgctggaatcccgaagtgcagtacacatccaattatgcaaaatctgccaacgttgattttactgtggacaacaatggactttatactgagcctcgccccattggcacccgttaccttacccgtcccctgtaa

SEQ ID NO: 1143 - DNA, 2211 bp, Artificial Sequence
  Synthetic polynucleotide
atggctgccgatggttatcttccagattggctcgaggacaacctctctgagggcattcgcgagtggtgggcgctgaaacctggagccccgaaacccaaagccaaccagcaaaagcaggacgacggccggggtctggtgcttcctggctacaagtacctcggacccttcaacggactcgacaagggggagcccgtcaacgcggcggacgcagcggccctcgagcacgacaaggcctacgaccagcagctcaaggcgggtgacaatccgtacctgcggtataaccacgccgacgccgagtttcaggagcgtctgcaagaagatacgtcttttgggggcaacctcgggcgagcagtcttccaggccaaaaagaggcttcttgaacctcttggtctggttgaggaaggggctaagacggctcctggaaagaaacgtccggtagagcagtcgccacaagagccagactcctcctcgggcattggcaagacaggccagcagcccgctaaaaagagactcaactttgggcagactggcgactcagagtcagtgcccgatcctcaacctctcggagaacctccagcaacccccgctgctgtgggacctactacaatggcttcaggcggtggcgcaccaatggcggacaataacgaaggcgccgatggagtgggtaattcctcgggaaattggcattgcgattccacatggatgggcgacagagtcatcaccaccagcacccgaacctgggccctgcccacctacaacaatcacctctacaagcaaatctccagtgcttcaacgggggccagcaacgacaaccactacttcggctacagcaccccctgggggtattttgatttcaacagattccactgccatttttcaccacgtgactggcagcgactcatcaacaacaactggggattccggcccaagagactcaacttcaagctcttcaacatccaggtcaaggaggtcacgcagaatgaaggcaccaagaccatcgccaataaccttaccagcacgattcaggtctttacggattcggaataccagctcccgtacgtcctcggctctgcgcaccagggctgcctccctccgttcccggcggacgtgttcattattccgcagtacggctacctaacgctcaacaatggtagccaggcagtgggacggtcatccttttactgcctggaatatttcccatcgcagatgctgagaacgggcaacaactttaccttcagctacacctttgaggacgttcctttccacagcagctacgctcacagccagagtctggaccgtctcatgaatcctctgattgaccagtacctgtactacttgtctcggactcaaacaacaggaggcacggcaaatacgcagactctgggcttcagccaaggtgggcctaatacaatggccaatcaggcaaagaactggctgccaggaccctgttaccgccaacaacgcgtctcaacgacaaccgggcaaaacaacaatagcaactttgcctggactgctgggaccaaataccatctgaatggaagaaattcattggctaatcctggcatcgctatggcaacacacaaagacgacaaggagcgtttttttcccagtaacgggatcctgatttttggcaaacaaaatgctgccagagacaatgcggattacagcgatgtcatgctcaccagcgaggaagaaatcaaaaccactaaccctgtggctacagaggaatacggtatcgtggcagataacttgcagcagcaaaacacggctcctcaaattggaactgtcaacagccagggggccttacccggtatggtctggcagaaccgggacgtgtacctgcagggtcccatctgggccaagattcctcacacggacggcaacttccacccgtctccgctgatgggcggctttggcctgaaacatcctccgcctcagatcctgatcaagaacacgccagtacctgcggatcctccgaccaccttcaaccagtcaaagctgaactctttcatcacgcaatacagcaccggacaggtcagcgtggaaattgaatgggagctgcagaaggaaaacagcaagcgctggaaccccgagatccagtacacctccaactactacaaatctacaagtgtggactttgctgttaatacagaaggcgtgtactctgaaccccaccccattggcacccgttacctcacccgtcccctgtaa

SEQ ID NO: 1144 - DNA, 2211 bp, Artificial Sequence
  Synthetic polynucleotide
atggctgccgatggttatcttccagattggctcgaggacaacctctctgagggcattcgcgagtggtgggcgctgaaacctggagccccgaaacccaaagccaaccagcaaaagcaggacgacggccggggtctggtgcttcctggctacaagtacctcggacccttcaacggactcgacaagggggagcccgtcaacgcggcggatgcagcggccctcgagcacgacaaggcctacgaccagcagctcaaggcgggtgacaatccgtacctgcggtataaccacgccgacgccgagtttcaggagcgtctgcaagaagatacgtcttttgggggcaacctcgggcgagcagtcttccaggccaaaaagagggttcttgaaccttttggtctggttgaggaagctgctaagacggctcctggaaagaaacgtccggtagagcagtcgccacaagagccagactcctcctcgggcattggcaagacaggccagcagcccgctaaaaagagactcaattttggtcagactggcgactcagagtcagtgcccgaccctcaacctctcggagaacctccagcaacccccgctgctgtgggacctactacaatggcttcaggcggtggcgcaccaatggcagacaataacgaaggcgccgatggagtgggtaatgcctcaggaaattggcattgcgattccacatggctgggcgacagagtcatcaccaccagcacccgaacctgggccctgcccacctacaacaatcacctctacaagcaaatctccagtgcttcaacgggggccagcaacgacaaccactacttcggctacagcaccccctgggggtattttgactttaacagattccactgccacttttcaccacgtgactggcagcgactcatcaacaacaactggggattccggcccaagagactcaacttcaagctcttcaacatccaggtcaaggaggtcacgcagaatgaaggcaccaagaccatcgccaataacctcaccagcaccattcaggtctttacggattcggaataccagctcccgtacgtcctcggctctgcccaccagggctgcctccctccgttcccggcggacgtgttcatgattccgcagtacggctacctaacgctcaacaatggtagccaggcagtgggacggtcatccttttactgcctggaatatttcccatcgcagatgctgagaacgggcaacaactttaccttcagctacacctttgaggacgttcctttccacagcagctacgctcacagccagagtctggaccgtctcatgaatcctctgattgaccagtacctgtactacttgtctcggactcaaacaacaggaggcacggcaaatacgcagactctgggcttcagccaaggtgggcctaatacaatggccaatcacgcaaagaactggctgccaggaccctgttaccgccaacaacgcgtctcaacgacaaccgggcaaaacaacaatagcaactttgcctggactgctgggaccaaataccatctgaatggaagaaattcattggctaatcctggcatcgctatggcaacacacaaagacgacaaggagcgtttttttcccagtaacgggatcctgatttttggcaaacaaaatgctgccagagacaatgcggattacagcgatgtcatgctcaccagcgaggaagaaatcaaaaccactaaccctgtggctacagaggaatacggtatcgtggcagataacttgcagcagcaaaacacggctcctcaaattggaactgtcaacagccagggggccttacccggtatggtctggcagaaccgggacgtgtacctgcagggtcccatctgggccaagattcctcacacggacggcaacttccacccgtctccgctgatgggcggctttggcctgaaacatcctccgcctcagatcctgatcaagaacacgcctgtacctgcggatcctccgaccaccttcaaccagtcaaagctgaactctttcatcacgcaatacagcaccggacaggtcagcgtggaaattgaatgggagctgcagaaggaaaacagcaagcgctggaaccccgagatccagtacacctccaactactacaaatctacaagtgtggactttgctgttaatacagaaggcgtgtactctgaaccccaccccattggcacccgttacctcacccgtcccctgtaa

SEQ ID NO: 1145 - DNA, 2211 bp, Artificial Sequence
  Synthetic polynucleotide
atggctgccgatggttatcttccagattggctcgaggacaacctctctgagggcattcgcgagtggtgggcgctgaaacctggagccccgaagcccaaagccaaccagcaaaagcaggacgacggccggggtctggtgcttcctggctacaagtacctcggacccttcaacggactcgacaaaggagagcccgtcaacgaggcggacgcggcggccctcgaacacgacaaggcttacgaccagcagctcaaggccggtgacaacccctacctgcggtacaaccacgccgacgccgagttccaggagcggctgcaagaagatacgtcttttgggggcaacctcgggcgagcagtcttccaggccaagaagaggcttcttgaacctcttggtctggttgaggaagcggctaagacggctcctggaaagaagaggcctgtagagcagtctcctcaggaaccggactcctccgcgggtattggcaaatcaggtgcacagcccgctaaaaagagactcaattttggtcagactggcgactcagagtcagtccccgacccacaacctctcggagaacctccagcaacccccgctgctgtgggacctactacaatggcttcaggcggtggcgcaccaatggcagacaataacgaaggcgccgatggagtgggtaatgcctcaggaaattggcattgcgattccacatggctgggcgacagagtcatcaccaccagcacccgaacctgggccctgcccacctataacaaccatctctacaagcaaatctccagtgcttcaacgggggccagtaacgacaaccactacttcggctacagcaccccctgggggtattttgactttaacagattccactgccacttctcaccacgtgactggcagcgactcatcaacaacaactggggattccggcccaagcgactcaacttcaagctcttcaacattcaggtcaaagaggttacggacaacgatggagtcaagaccatcgccaataaccttaccagcaccattcaggtgtttacggactcggaataccagctgccgtacgttctcggctccgcccaccagggctgcctgcctccgttcccggcggacgtgttcatgattccccagtacggctacctaacactcaacaacggtagtcaggccgtgggacgctcctccttctactgcctggaatactttccttcgcagatgctgagaactggcaacaacttccagtttacttacaccttcgaggacgtgcctttccacagcagctacgcccacagccagagcttggaccggctgatgaatcctctgattgaccagtacctgtactacttgtctcggactcaaacaacaggaggcacggcaaatacgcagactctgggcttcagccaaggtgggcctaatacaatggccaatcaggcaaagaactggctgccaggaccctgttaccgccaacaacgcgtctcaacgacaaccgggcaaaacaacaatagcaactttgcctggactgctgggaccaaataccatctgaatggaagaaattcattggctaatcctggcatcgctatggcaacacacaaagacgacaaggagcgtttttttcccagtaacgggatcctgatttttggcaaacaaaatgctgccagagacaatgcggattacagcgatgtcatgctcaccagcgaggaagaaatcaaaaccactaaccctgtggctacagaggaatacggtatcgtggcagataacttgcagcagcaaaacacggctcctcaaattggaactgtcaacagccagggggccttacccggtatggtctggcagaaccgggacgtgtacctgcagggtcccatctgggccaagattcctcacacggacggcaacttccacccgtctccgctgatgggcggctttggcctgaaacatcctccgcctcagatcctgatcaagaacacgcctgtacctgcggatcctccgaccaccttcaaccagtcaaagctgaactctttcatcacgcaatacagcaccggacaggtcagcgtggaaattgaatgggagctgcagaaggaaaacagcaagcgctggaaccccgagatccagtacacctccaactactacaaatctacaagtgtggactttgctgttaatacagaaggcgtgtactctgaaccccaccccattggcacccgttacctcacccgtcccctgtaa

SEQ ID NO: 1146 - DNA, 2211 bp, Artificial Sequence
  Synthetic polynucleotide
atggctgccgatggttatcttccagattggctcgaggacaacctctctgagggcattcgcgagtggtgggcgctgaaacctggagccccgaagcccaaagccaaccagcaaaagcaggacgacggccggggtctggtgcttcctggctacaagtacctcggacccttcaacggactcgacaagggggagcccgtcaacgcggcggatgcagcggccctcgagcacgacaaagcctacgaccagcagctcaaagcgggtgacaatccgtacctgcggtataaccacgccgacgccgagtttcaggagcgtctgcaagaagatacgtcttttgggggcaacctcgggcgagcagtcttccaggccaagaagagggttctcgaacctttgggtctggttgaggaaggggctaagacggctcctggaaagaaaaggccggtagagcagtctcctcaggaaccggactcctccgcgggtattggcaagacaggtgcacagcccgctaaaaagagactcaattttggtcagactggcgactcagagtcagtccccgacccacaacctctcggagaacctccagcaacccccgctgctgtgggacctactacaatggcttcaggcggtggcgcaccaatggcagacaataacgaaggcgccgacggagtgggtagtgcctcgggaaattggcattgcgattccacatggctgggcgacagagtcatcaccaccagcacccgaacctgggccctgcccacctataacaaccatctctacaagcaaatctccagtgcttcaacgggggccagtaacgacaaccactacttcggctacagcaccccctgggggtattttgacttcaacagattccactgccacttctcaccacgtgactggcagcgactcatcaacaacaactggggattccggcccaagcgactcaacttcaagctcttcaacattcaggtcaaagaggttacggacaacaatggagtcaagaccatcgccaataaccttaccagcacgatccaggtctttacggactcggagtaccagctgccgtacgtcctcggctctgcgcaccagggctgcctgcctccgttcccggcggacgtgttcatgattccgcagtacggctacctaacgctcaacaatggtagccaggcagtgggacggtcatccttttactgcctggaatatttcccatcgcagatgctgagaacgggcaacaactttaccttcagctacacctttgaggacgttcctttccacagcagctacgctcacagccagagtctggaccgtctcatgaatcctctgattgaccagtacctgtactacttgtctcggactcaaacaacaggaggcacggcaaatacgcagactctgggcttcagccaaggtgggcctaatacaatggccaatcaggcaaagaactggctgccaggaccctgttaccgccaacaacgcgtctcaacgacaaccgggcaaaacaacaatagcaactttgcctggactgctgggaccaaataccatctgaatggaagaaattcattggctaatcctggcatcgctatggcaacacacaaagacgacaaggagcgtttttttcccagtaacgggatcctgatttttggcaaacaaaatgctgccagagacaatgcggattacagcgatgtcatgctcaccagcgaggaagaaatcaaaaccactaaccctgtggctacagaggaatacggtatcgtggcagataacttgcagcagcaaaacacggctcctcaaattggaactgtcaacagccagggggccttacccggtatggtctggcagaaccgggacgtgtacctgcagggtcccatctgggccaagattcctcacacggacggcaacttccacccgtctccgctgatgggcggctttggcctgaaacatcctccgcctcagatcctgatcaagaacacgcctgtacctgcggatcctccgaccaccttcaaccagtcaaagctgaactctttcatcacgcaatacagcaccggacaggtcagcgtggaaattgaatgggagctgcagaaggaaaacagcaagcgctggaaccccgagatccagtacacctccaactactacaaatctacaagtgtggactttgctgttaatacagaaggcgtgtactctgaaccccaccccattggcacccgttacctcacccgtcccctgtaa

SEQ ID NO: 1147 - DNA, 2211 bp, Artificial Sequence
  Synthetic polynucleotide
atggctgccgatggttatcttccagattggctcgaggacaacctctctgagggcattcgcgagtggtgggacttgaaacctggagccccgaagcccaaagccaaccagcaaaagcaggacgacggccggggtctggtgcttcctggctacaagtacctcggacccttcaacggactcgacaagggggagcccgtcaacgcggcggacgcagcggccctcgagcacgacaaggcctacgaccagcagctcaaagcgggtgacaatccgtacctgcggtataaccacgccgacgccgagtttcaggagcgtctgcaagaagatacgtcttttgggggcaacctcggacgagcagtcttccaggccaaaaagaggcttcttgaacctcttggtctggttgaggaagcggctaagacggctcctggaaagaagaggcctgtagagcagtctcctcaggaaccggactcctccgcgggtattggcaaatcgggtgcacagcccgctaaaaagagactcaatttcggtcagactggcgacacagagtcagtcccagaccctcaaccaatcggagaacctccagcagcgccctctggtgtgggacctaatacaatggctgcaggcggtggcgcaccaatggcagacaataacgaaggtgccgatggagtgggtagttcctcgggaaattggcattgcgattcccaatggctgggggacagagtcatcaccaccagcacccgaacctgggccctgcccacctataacaaccacctctacaagcaaatctccagtgcttcaacgggggccagcaacgacaaccactactttggctacagcaccccttgggggtattttgacttcaacagattccactgccacttttcaccacgtgactggcaaagactcatcaacaacaactggggattccgacccaagagactcaacttcaagctcttcaacatccaggtcaaggaggtcacgcagaatgaaggcaccaagaccatcgccaataacctcaccagcaccatccaggtgtttacggactcggagtaccagctgccgtacgttctcggctctgcccaccagggctgcctgcctccgttcccggcggacgtgttcatgattccccagtacggctacctaacactcaacaacggtagtcaggccgtgggacgctcctccttctactgcctggaatactttccttcgcagatgctgagaaccggcaacaacttccagtttacttacaccttcgaggacgtgcctttccacagcagctacgcgcacagccagagcttggaccggctgatgaatcctctgattgaccagtacctgtactacttgtctcggactcaaacaacaggaggcacggcaaatacgcagactctgggcttcagccaaggtgggcctaatacaatggccaatcacgcaaagaactggctgccaggaccctgttaccgccaacaacgcgtctcaacgacaaccgggcaaaacaacaatagcaactttgcctggactgctgggaccaaataccatctgaatggaagaaattcattggctaatcctggcatcgctatggcaacacacaaagacgacaaggagcgtttttttcccagtaacgggatcctgatttttggcaaacaaaatgctgccagagacaatgcggattacagcgatgtcatgctcaccagcgaggaagaaatcaaaaccactaaccctgtggctacagaggaatacggtatcgtggcagataacttgcagcagcaaaacacggctcctcaaattggaactgtcaacagccagggggccttacccggtatggtctggcagaaccgggacgtgtacctgcagggtcccatctgggccaagattcctcacacggacggcaacttccacccgtctccgctgatgggcggctttggcctgaaacatcctccgcctcagatcctgatcaagaacacgcctgtacctgcggatcctccgaccaccttcaaccagtcaaagctgaactctttcatcacgcaatacagcaccggacaggtcagcgtggaaattgaatgggagctgcagaaggaaaacagcaagcgctggaaccccgagatccagtacacctccaactactacaaatctacaagtgtggactttgctgttaatacagaaggcgtgtactctgaaccccaccccattggcacccgttacctcacccgtcccctgtaa

SEQ ID NO: 1148 - DNA, 2214 bp, Artificial Sequence
  Synthetic polynucleotide
atggctgccgatggttatcttccagattggctcgaggacaaccttagtgaaggaattcgcgagtggtgggcgctgaaacctggagccccgaagcccaaagccaaccagcaaaagcaggacgacggccggggtctggtgcttcctggctacaagtacctcggacccttcaacggactcgacaagggggagcccgtcaacgcggcggacgcagcggccctcgagcacgacaaggcctacgaccagcagctcaaagcgggtgacaatccgtacctgcggtataaccacgccgacgccgagtttcaggagcgtctgcaagaagatacgtcttttgggggcaacctcgggcgagcagtcttccaggccaagaagcgggttctcgaacctctcggtctggttgaggaaggcgctaagacggctcctggaaagaaacgtccggtagagcagtcgccacaagagccagactcctcctcgggcatcggcaagacaggccagcagcccgctaaaaagagactcaatttcggtcagactggcgacacagagtcagtcccagaccctcaaccaatcggagaacctcccgcagccccctcaggtgtgggatctcttacaatggcttcaggtggtggcgcaccagtggcagacaataacgaaggtgccgatggagtgggtagttcctcgggaaattggcattgcgattcccaatggctgggggacagagtcatcaccaccagcaccagaacctgggccttgcccacctacaataaccacctctacaagcaaatctccaacagcacatctggaggatcttcaaatgacaacgcctacttcggctacagcaccccctgggggtattttgactttaacagattccactgccacttttcaccacgtgactggcagcgactcatcaacaacaactggggattccgacccaagagactcaacttcaagctcttcaacatccaggtcaaggaggtcacgcagaacgaaggcaccaagaccatcgccaataacctcaccagcaccatccaggtgtttacggactcggagtaccagctgccgtacgttctcggctccgcccaccagggctgcctgcctccgttcccggcggacgtgttcatgattccccagtacggctacctaacgctcaacaacggtagtcaggccgtgggacgctcctccttctactgcctggaatactttccttcgcagatgctgagaaccggcaacaacttccagtttacttacaccttcgaggacgtgcctttccacagcagctacgcgcacagccagagcttggaccggctgatgaatcctctgattgaccagtacctgtactacttgtctcggactcaaacaacaggaggcacggcaaatacgcagactctgggcttcagccaaggtgggcctaatacaatggccaatcaggcaaagaactggctgccaggaccctgttaccgccaacaacgcgtctcaacgacaaccgggcaaaacaacaatagcaactttgcctggactgctgggaccaaataccatctgaatggaagaaattcattggctaatcctggcatcgctatggcaacacacaaagacgacaaggagcgtttttttcccagtaacgggatcctgatttttggcaaacaaaatgctgccagagacaatgcggattacagcgatgtcatgctcaccagcgaggaagaaatcaaaaccactaaccctgtggctacagaggaatacggtatcgtggcagataacttgcagcagcaaaacacggctcctcaaattggaactgtcaacagccagggggccttacccggtatggtctggcagaaccgggacgtgtacctgcagggtcccatctgggccaagattcctcacacggacggcaacttccacccgtctccgctgatgggcggctttggcctgaaacatcctccgcctcagatcctgatcaagaacacgcctgtacctgcggatcctccgaccaccttcaaccagtcaaagctgaactctttcatcacgcaatacagcaccggacaggtcagcgtggaaattgaatgggagctgcagaaggaaaacagcaagcgctggaaccccgagatccagtacacctccaactactacaaatctacaagtgtggactttgctgttaatacagaaggcgtgtactctgaaccccaccccattggcacccgttacctcacccgtcccctgtaa

SEQ ID NO: 1149 - DNA, 2214 bp, Artificial Sequence
  Synthetic polynucleotide
atggctgccgatggttatcttccagattggctcgaggacaaccttagtgaaggaattcgcgagtggtgggcgctgaaacctggagccccgaagcccaaagccaaccagcaaaagcaggacgacggccggggtctggtgcttcctggctacaagtacctcggacccttcaacggactcgacaagggggagcccgtcaacgcggcggacgcagcggccctcgagcacgacaaggcctacgaccagcagctcaaagcgggtgacaatccgtacctgcggtataaccacgccgacgcggagtttcaggagcgccttaaagaagatacgtcttttgggggcaacctcgggcgagcagtcttccaggccaagaagagggttctcgaaccttttggtctggttgaggaaggtgctaagacggctcctggaaagaaacgtccggtagagcagtcgccacaagagccagactcctcctcgggcatcggcaagacaggccagcagcccgctaaaaagagactcaattttggtcagactggcgactcagagtcagttccagaccctcaacctctcggagaacctccagcagcgccctctggtgtgggacctaatacaatggctgcaggcggtggcgcaccaatggcagacaataacgaaggtgccgatggagtgggtagttcctcgggaaattggcattgcgattcccaatggctggggaacagagtcatcaccaccagcacccgaacctgggccctgcccacctacaacaatcacctctacaagcaaatctccaacagcacatctggaggatcttcaaatgacaacgcctacttcggctacagcaccccctgggggtattttgacttcaacagattccactgccacttctcaccacgtgactggcagcgactcatcaacaacaactggggattccggcccaagagactcaacttcaagctcttcaacattcaggtcaaagaggttacggacaacaatggagtcaagaccatcgccaataaccttaccagcacggtccaggtcttcacggactcggagtaccagttgccgtacgtcctcggctctgcgcaccagggctgcctccctccgttcccggcggacgtgttcatgattccgcaatacggctacctgacgctcaacaacggtagccaagccgtgggacgttcatccttttactgcctggaatatttcccttctcagatgctgagaaccggcaacaacttccagtttacttacaccttcgaggacgtgcctttccacagcagctacgcgcacagccagagcttggaccggctgatgaatcctctgattgaccagtacctgtactacttgtctcggactcaaacaacaggaggcacggcaaatacgcagactctgggcttcagccaaggtgggcctaatacaatggccaatcaggcaaagaactggctgccaggaccctgttaccgccaacaacgcgtctcaacgacaaccgggcaaaacaacaatagcaactttgcctggactgctgggaccaaataccatctgaatggaagaaattcattggctaatcctggcatcgctatggcaacacacaaagacgacaaggagcgtttttttcccagtaacgggatcctgatttttggcaaacaaaatgctgccagagacaatgcggattacagcgatgtcatgctcaccagcgaggaagaaatcaaaaccactaaccctgtggctacagaggaatacggtatcgtggcagataacttgcagcagcaaaacacggctcctcaaattggaactgtcaacagccagggggccttacccggtatggtctggcagaaccgggacgtgtacctgcagggtcccatctgggccaagattcctcacacggacggcaacttccacccgtctccgctgatgggcggctttggcctgaaacatcctccgcctcagatcctgatcaagaacacgcctgtacctgcggatcctccgaccaccttcaaccagtcaaagctgaactctttcatcacgcaatacagcaccggacaggtcagcgtggaaattgaatgggagctgcagaaggaaaacagcaagcgctggaaccccgagatccagtacacctccaactactacaaatctacaagtgtggactttgctgttaatacagaaggcgtgtactctgaaccccaccccattggcacccgttacctcacccgtcccctgtaa

SEQ ID NO: 1150 - DNA, 2211 bp, Artificial Sequence
  Synthetic polynucleotide
atggctgccgatggttatcttccagattggctcgaggacaacctctctgagggcattcgcgagtggtgggacttgaaacctggagccccgaagcccaaagccaaccagcaaaagcaggacgacggccggggtctggtgcttcctggctacaagtacctcggacccttcaacggactcgacaggggggagcccgtcaacgcggcggacgcagcggccctcgagcacgacaaggcctacgaccagcagctcaaagcgggtgacaatccgtacctgcggtataaccacgccgacgccgagtttcaggagcgtctgcaagaagatacgtcttttgggggcaacctcgggcgagcagtcttccaggccaagaagcgggttctcgaacctctcggtctggttgaggaaggcgctaagacggctcctggaaagaaacgtccggtagagcagtcgccacaagagccagactcctcctcgggcatcggcaagacaggccagcagcccgctaaaaagagactcaattttggtcagactggcgactcagagtcagtccccgacccacaacctctcggagaacctccagcaacccccgctgctgtgggacctactacaatggcttcaggcggtggcgcaccaatggcagacaataacgaaggcgccgacggagtgggtaatgcctcaggaaattggcattgcgattccacatggctgggcgacagagtcatcaccaccagcacccgaacctgggccttgcccacctataacaaccacctctacaagcaaatctccagtgcttcaacgggggccagcaacgacaaccactacttcggctacagcaccccctgggggtattttgacttcaacagattccactgccacttctcaccacgtgactggcagcgactcatcaacaacaactggggattccggcctaagcgactcaacttcaagctcttcaacattcaggtcaaagaggttacggacaacaatggagtcaagaccatcgccaataacctcaccagcaccatccaggtgtttacggactcggagtaccagctgccgtacgttctcggctctgcccaccagggctgcctgcctccgttcccggcggacgtgttcatgattccccagtacggctacctaacactcaacaacggtagtcaggccgtgggacgctcctccttctactgcctggaatactttccttcgcagatgctgagaaccggcaacaacttccagtttacttacaccttcgaggacgtgcctttccacagcagctacgcccacagccagagcttggaccggctgatgaatcctctgattgaccagtacctgtactacttgtctcggactcaaacaacaggaggcacggcaaatacgcagactctgggcttcagccaaggtgggcctaatacaatggccaatcaggcaaagaactggctgccaggaccctgttaccgccaacaacgcgtctcaacgacaaccgggcaaaacaacaatagcaactttgcctggactgctgggaccaaataccatctgaatggaagaaattcattggctaatcctggcatcgctatggcaacacacaaagacgacaaggagcgtttttttcccagtaacgggatcctgatttttggcaaacaaaatgctgccagagacaatgcggattacagcgatgtcatgctcaccagcgaggaagaaatcaaaaccactaaccctgtggctacagaggaatacggtatcgtggcagataacttgcagcagcaaaacacggctcctcaaattggaactgtcaacagccagggggccttacccggtatggtctggcagaaccgggacgtgtacctgcagggtcccatctgggccaagattcctcacacggacggcaacttccacccgtctccgctgatgggcggctttggcctgaaacatcctccgcctcagatcctgatcaagaacacgcctgtacctgcggatcctccgaccaccttcaaccagtcaaagctgaactctttcatcacgcaatacagcaccggacaggtcagcgtggaaattgaatgggagctgcagaaggaaaacagcaagcgctggaaccccgagatccagtacacctccaactactacaaatctacaagtgtggactttgctgttaatacagaaggcgtgtactctgaaccccaccccattggcacccgttacctcacccgtcccctgtaa

SEQ ID NO: 1151 - DNA, 2211 bp, Artificial Sequence
  Synthetic polynucleotide
atggctgccgatggttatcttccagattggctcgaggacaacctctctgagggcattcgcgagtggtgggacttgaaacctggagccccgaagcccaaagccaaccagcaaaagcaggacgacggccggggtctggtgcttcctggctacaagtacctcggacccttcaacggactcgacaagggggagcccgtcaacgcggcggacgcagcggccctcgagcacgacaaggcctacgaccagcagctcaaagcgggtgacaatccgtacctgcggtataaccacgccgacgccgagtttcaggagcgtctgcaagaagatacgtcttttgggggcaacctcgggcgagcagtcttccaggccaagaagcgggttctcgaacctctcggtctggttgaggaaggcgctaagacggctcctggaaagaaacgtccggtagagcagtcgccacaagagccagactcctcctcgggcatcggcaagaaaggccaacagcccgccagaaaaagactcaattttggtcagactggcgactcagagtcagttccagaccctcaacctctcggagaacctcccgcagccccctcaggtgtgggatctcttacaatggcttcaggcggtggcgcaccaatggcagacaataacgaaggcgccgacggagtgggtaatgcctcaggaaattggcattgcgattccacatggctgggcgacagagtcatcaccaccagcacccgaacatgggccttgcccacttacaacaaccatctctacaagcaaatctccagtgcttcaacgggggccagcaacgacaaccactacttcggctacagcaccccctgggggtattttgatttcaacagattccactgccacttttcaccacgtgactggcaaagactcatcaacaacaactggggattccgacccaagagactcaacttcaagctctttaacattcaagtcaaagaggtcacgcagaatgaaggcaccaagaccatcgccaataaccttaccagcacggtccaggtcttcacggactcagactatcagctcccgtacgttctcggctccgcccaccagggctgcctgcctccgttcccggcggacgtgttcatgattccccagtacggctacctaacactcaacaacggtagtcaggccgtgggacgctcctccttctactgcctggaatactttccttcgcagatgctgagaaccggcaacaacttccagtttacttacacctttgaggacgttcctttccacagcagctacgctcacagccagagtctggaccgtctcatgaatcctctgattgaccagtacctgtactacttgtctcggactcaaacaacaggaggcacggcaaatacgcagactctgggcttcagccaaggtgggcctaatacaatggccaatcaggcaaagaactggctgccaggaccctgttaccgccaacaacgcgtctcaacgacaaccgggcaaaacaacaatagcaactttgcctggactgctggaaccaaataccatctgaatggaagaaattcattgtctaatcctggcatcgctatggcgacacacaaagacgacaaggagcgtttttttcccagtaacgggatcctgatttttggcaaacaaaatgctgccagagacaatgcggattacagcgatgtcatgctcaccagcgaggaagaaatcaaaaccactaaccctgtggctacagaggaatacggtatcgtggcagataacttgcagcagcaaaacacggctcctcaaattggaactgtcaacagccagggggccttacccggtatggtctggcagaaccgggacatgtacctgcagggtcccatctgggccaagattcctcacacggacggcaacttccacccgtctccgctgatgggcggctttggcctgaaacatcctccgcctcagatcctgatcaagaacacgcctgtacctgcggatcctccgaccaccttcaaccagtcaaagctgaactctttcatcacgcaatacagcaccggacaggtcagcgtggaaattgaatgggagctgcagaaggaaaacagcaagcgctggaaccccgagatccagtacacctccaactactacaaatctacaagtgtggactttgctgttaatacagaaggcgtgtactctgaaccccaccccattggcacccgttacctcacccgtcccctgtaa

SEQ ID NO: 1152 - DNA, 2211 bp, Artificial Sequence
  Synthetic polynucleotide
atggctgccgatggttatcttccagattggctcgaggacaacctctctgagggcattcgcgagtggtgggcgctgaaacctggagccccgaagcccaaagccaaccagcaaaagcaggacgacggccggggtctggtgcttcctggctacaagtacctcggacccttcaacggactcgacaagggggagcccgtcaacgcggcggatgcagcggccctcgagcacgacaaggcctacgaccagcagctcaaagcgggtgacaatccgtacctgcggtataaccacgccgacgccgagtttcaggagcgtctgcaggaagatacgtcttttgggggcaacctcgggcgagcagtcttccaggccaagaagagggttctcgaaccttttggtctggttgaggaaggcgctaagacggctcctggaaagaaacgtccggtagagcagtcgccacaagagccagactcctcctcgggcatcggcaagacaggccagcagcccgctaaaaagagactcaattttggtcagactggcggctcagagtcagtccccgacccacaacctctcggagaacctccagcaacccccgctgctgtgggacctactacaatggctgcaggcggtggcgcaccaatggcagacaataacgaaggcgccgacggagtgggtagttcctcgggaaattggcattgcgattccacatggctgggcgacagagtcatcaccaccagcaccagaacctgggccttgcccacctataacaaccacctctacaagcaaatctccagtgcttcaacgggggccagcaacgacaaccactacttcggctacagcaccccctgggggtattttgatttcaacagattccactgccatttctcaccacgtgactggcagcgactcatcaacaacaactggggattccggcccaagagactcaacttcaaactcttcaacattcaggtcaaagaggttacggacaacaatggagtcaagaccatcgccaataaccttaccagcacggtccaggtgtttacggactcggagtaccagctgccgtacgttctcggctctgcccaccagggctgcctccctccgttcccggcggacgtgttcatgattccgcagtacggctacctaacgctcaacaatggcagccaggcagtgggacggtcatccttttactgcctggaatatttcccttctcagatgctgagaacgggcaacaactttaccttcagctacacctttgaggaagtgcctttccacagcagctacgcgcacagccagagcctggaccggctgatgaatcctctgattgaccagtacctgtactacttgtctcggactcaaacaacaggaggcacggcaaatacgcagactctgggcttcagccaaggtgggcctaatacaatggccaatcaggcaaagaactggctgccaggaccctgttaccgccaacaacgcgtctcaacgacaaccgggcaaaacaacaatagcaactttgcctggactgctgggaccaaataccatctgaatggaagaaattcattggctaatcctggcatcgctatggcctcacacaaagacgacaaggagcgtttttttcccagtaacgggatcctgatttttggcaaacaaaatgctgccagagacaatgcggattacagcgatgtcatgctcaccagcgaggaagaaatcaaaaccactaaccctgtggctacagaggaatacggtatcgtggcagataacttgcagcagcaaaacacggctcctcaaattggaactgtcaacagccagggggccttacccggtatggtctggcagaaccgggacgtgtacctgcagggtcccatctgggccaagattcctcacacggacggcaacttccacccgtctccgctgatgggcggctttggcctgaaacatcctccgcctcagatcctgatcaagaacacgcctgtacctgcggatcctccgaccaccttcaaccagtcaaagctgaactctttcatcacgcaatacagcaccggacaggtcagcgtggaaattgaatgggagctgcagaaggaaaacagcaagcgctggaaccccgagatccagtacacctccaactactacaaatctacaagtgtggactttgctgttaatacagaaggcgtgtactctgaaccccaccccattggcacccgttacctcacccgtcccctgtaa

SEQ ID NO: 1153 - protein, 736 aa, Artificial Sequence
  Synthetic polypeptide
MAADGYLPDWLEDTLSEGIRQWWKLKPGPPPPKPAERHKDDSRGLVLPGYKYLGPFNGLDKGEPVNEADAAALEHDKAYDQQLKAGDNPYLKYNHADAEFQERLKEDTSFGGNLGRAVFQAKKRVLEPLGLVEEGAKTAPGKKRPVEQSPQEPDSSSGIGKTGQQPAKKRLNFGQTGDSESVPDPQPLGEPPATPAAVGPTTMASGGGAPMADNNEGADGVGSSSGNWHCDSQWLGDRVITTSTRTWALPTYNNHLYKQISSASTGASNDNHYFGYSTPWGYFDFNRFHCHFSPRDWQRLINNNWGFRPKRLNFKLFNIQVKEVTQNEGTKTIANNLTSTIQVFTDSEYQLPYVLGSAHQGCLPPFPADVFMIPQYGYLTLNNGSQAVGRSSFYCLEYFPSQMLRTGNNFQFTYTFEDVPFHSSYAHSQSLDRLMNPLIDQYLYYLSRTQTTGGTANTQTLGFSQGGPNTMANQAKNWLPGPCYRQQRVSTTTGQNNNSNFAWTAGTKYHLNGRNSLANPGIAMATHKDDKERFFPSNGILIFGKQNAARDNADYSDVMLTSEEEIKTTNPVATEEYGIVADNLQQQNTAPQIGTVNSQGALPGMVWQNRDVYLQGPIWAKIPHTDGNFHPSPLMGGFGLKHPPPQILIKNTPVPADPPTTFNQSKLNSFITQYSTGQVSVEIEWELQKENSKRWNPEIQYTSNYYKSTSVDFAVNTEGVYSEPHPIGTRYLTRPL

SEQ ID NO: 1154 - protein, 736 aa, Artificial Sequence
  Synthetic polypeptide
MAADGYLPDWLEDNLSEGIREWWALKPGAPKPKANQQKQDDGRGLVLPGYKYLGPFNGLDKGEPVNAADAAALEHDKAYDQQLKAGDNPYLKYNHADAEFQERLKEDTSFGGNLGRAVFQAKKRLLEPLGLVEEAAKTAPGKKRPVEQSPQEPDSSAGIGKSGAQPAKKRLNFGQTGDSESVPDPQPLGEPPATPAAVGPTTMASGGGAPMADNNEGADGVGNASGNWHCDSTWLGDRVITTSTRTWALPTYNNHLYKQISSASTGASNDNHYFGYSTPWGYFDFNRFHCHFSPRDWQRLINNNWGFRPKRLNFKLFNIQVKEVTQNEGTKTIANNLTSTIQVFTDSEYQLPYVLGSAHQGCLPPFPADVFMIPQYGYLTLNNGSQAVGRSSFYCLEYFPSQMLRTGNNFQFTYTFEDVPFHSSYAHSQSLDRLMNPLIDQYLYYLSRTQTTGGTANTQTLGFSQGGPNTMANQAKNWLPGPCYRQQRVSTTTGQNNNSNFAWTAGTKYHLNGRNSLANPGIAMATHKDDKERFFPSNGILIFGKQNAARDNADYSDVMLTSEEEIKATNPVATEEYGIVADNLQQQNTAPQIGTVNSQGALPGMVWQNRDVYLQGPIWAKIPHTDGNFHPSPLMGGFGLKHPPPQILIKNTPVPADPPTTFNQSKLNSFITQYSTGQVSVEIEWELQKENSKRWNPEIQYTSNYYKSTSVDFAVNTEGVYSEPHPIGTRYLTRPL

SEQ ID NO: 1155 - protein, 737 aa, Artificial Sequence
  Synthetic polypeptide
MAADGYLPDWLEDNLSEGIREWWDLKPGAPKPKANQQKQDDGRGLVLPGYKYLGPFNGLDKGEPVNAADAAALEHDKAYDQQLKAGDNPYLRYNHADAEFQERLQEDTSFGGNLGRAVFQAKKRVLEPLGLVEEGANTAPGKKRPVEQSPQEPDSSAGIGKSGAQPAKKRLNFGQTGDTESVPDPQPIGEPPAAPSGVGSLTMASGGGAPVADNNEGADGVGSSSGNWHCDSQWLGDRVITTSTRTWALPTYNNHLYKQISNSTSGGSSNDNAYFGYSTPWGYFDFNRFHCHFSPRDWQRLINNNWGFRPKRLNFKLFNIQVKEVTDNNGVKTIANNLTSTIQVFTDSEYQLPYVLGSAHQGCLPPFPADVFMIPQYGYLTLNNGSQAVGRSSFYCLEYFPSQMLRTGNNFQFTYTFEDVPFHSSYAHSQSLDRLMNPLIDQYLYYLSRTQTTGGTANTQTLGFSQGGPNTMANQAKNWLPGPCYRQQRVSTTTGQNNNSNFAWTAGTKYHLNGRNSLANPGIAMASHKDDKERFFPSNGILIFGKQNAARDNADYSDVMLTSEEEIKTTNPVATEEYGIVADNLQQQNTAPQIGTVNSQGALPGMVWQNRDVYLQGPIWAKIPHTDGNFHPSPLMGGFGLKHPPPQILIKNTPVPADPPTTFNQSKLNSFITQYSTGQVSVEIEWELQKENSKRWNPEIQYTTNYYKSTSVDFAVNTEGVYSEPHPIGTRYLTRPL

SEQ ID NO: 1156 - protein, 736 aa, Artificial Sequence
  Synthetic polypeptide
MAADGYLPDWLEDNLSEGIREWWALKPGAPKPKANQQKQDDGRGLVLPGYKYLGPFNGLDKGEPVNEADAAALEHDKAYDQQLKAGDNPYLRYNHADAEFQERLQEDTSFGGNLGRAVFQAKKRVLEPLGLVEEGAKTAPGKKRPVEQSPQEPDSSSGIGKTGQQPAKKRLNFGQTGDSESVPDPQPLGEPPATPAAVGPTTMASGGGAPMADNNEGADGVGNASGNWHCDSTWLGDRVITTSTRTWALPTYNNHLYKQISSASTGASNDNHYFGYSTPWGYFDFNRFHCHFSPRDWQRLINNNWGFRPKRLNFKLFNIQVKEVTQNEGTKTIANNLTSTIQVFTDSEYQLPYVLGSAHQGCLPPFPADVFMIPQYGYLTLNNGSQAVGRSSFYCLEYFPSQMLRTGNNFQFTYTFEDVPFHSSYAHSQSLDRLMNPLIDQYLYYLSRTQTTGGTANTQTLGFSQGGPNTMANQAKNWLPGPCYRQQRVSTTTGQNNNSNFAWTAGTKYHLNGRNSLANPGIAMATHKDDKERFFPSNGILIFGKQNAARDNADYSDVMLTSEEEIKTTNPVATEEYGIVADNLQQQNTAPQIGTVNSQGALPGMVWQNRDVYLQGPIWAKIPHTDGNFHPSPLMGGFGLKHPPPQILIKNTPVPADPPTTFNQSKLNSFITQYSTGQVSVEIEWELQKENSKRWNPEIQYTSNYYKSTSVDFAVNTEGVYSEPHPIGTRYLTRPL

SEQ ID NO: 1157 - protein, 736 aa, Artificial Sequence
  Synthetic polypeptide
MAADGYLPDWLEDNLSEGIREWWALKPGAPKPKANQQKQDDGRGLVLPGYKYLGPFNGLDKGEPVNEADAAALEHDKAYDQQLKAGDNPYLRYNHADAEFQERLQEDTSFGGNLGRAVFQAKKRVLEPFGLVEEGAKTAPGKKRPVEQSPQEPDSSSGIGKTGQQPAKKRLNFGQTGDSESVPDPQPLGEPPATPAAVGPTTMASGGGAPMADNNEGADGVGNASGNWHCDSQWLGDRVITTSTRTWALPTYNNHLYKQISSASTGASNDNHYFGYSTPWGYFDFNRFHCHFSPRDWQRLINNNWGFRPKRLNFKLFNIQVKEVTDNNGVKTIANNLTSTVQVFSDSEYQLPYVLGSAHQGCLPPFPADVFMIPQYGYLTLNNGSQAVGRSSFYCLEYFPSQMLRTGNNFQFTYTFEDVPFHSSYAHSQSLDRLMNPLIDQYLYYLSRTQTTGGTANTQTLGFSQGGPNTMANQAKNWLPGPCYRQQRVSTTTGQNNNSNFAWTAGTKYHLNGRNSLANPGIAMATHKDDKERFFPSNGILIFGKQNAARDNADYSDVMLTSEEEIKTTNPVATEEYGIVADNLQQQNTAPQIGTVNSQGALPGMVWQNRDVYLQGPIWAKIPHTDGNFHPSPLMGGFGLKHPPPQILIKNTPVPADPPTTFNQSKLNSFITQYSTGQVSVEIEWELQKENSKRWNPEIQYTSNYYKSTSVDFAVNTEGVYSEPHPIGTRYLTRPL

SEQ ID NO: 1158 - protein, 736 aa, Artificial Sequence
  Synthetic polypeptide
MAADGYLPDWLEDTLSEGIRQWWKLKPGPPPPKPAERHKDDSRGLVLPGYKYLGPFNGLDKGEPVNEADAAALEHDKAYDRQLDSGDNPYLKYNHADAEFQERLKEDTSFGGNLGRAVFQAKKRVLEPFGLVEEGAKTAPGKKRPVEQSPQEPDSSSGIGKTGQQPAKKRLNFGQTGDSESVPDPQPLGEPPATPAAVGPTTMASGGGAPMADNNEGADGVGNASGNWHCDSTWLGDRVITTSTRTWALPTYNNHLYKQISSASTGASNDNHYFGYSTPWGYFDFNRFHCHFSPRDWQRLINNNWGFRPKRLNFKLFNIQVKEVTDNNGVKTIANNLTSTVQVFTDSDYQLPYVLGSAHEGCLPPFPADVFMIPQYGYLTLNNGSQAVGRSSFYCLEYFPSQMLRTGNNFQFTYTFEDVPFHSSYAHSQSLDRLMNPLIDQYLYYLSRTQTTGGTANTQTLGFSQGGPNTMANQAKNWLPGPCYRQQRVSTTTGQNNNSNFAWTAGTKYHLNGRNSLANPGIAMATHKDDKERFFPSNGILIFGKQNAARDNADYSDVMLTSEEEIKTTNPVATEEYGIVADNLQQQNTAPQIGTVNSQGALPGMVWQNRDVYLQGPIWAKIPHTDGNFHPSPLMGGFGLKHPPPQILIKNTPVPADPPTTFNQSKLNSFITQYSTGQVSVEIEWELQKENSKRWNPEIQYTSNYYKSTSVDFAVNTEGVYSEPHPIGTRYLTRNL

SEQ ID NO: 1159 - protein, 738 aa, Artificial Sequence
  Synthetic polypeptide
MAADGYLPDWLEDNLSEGIREWWDLKPGAPKPKANQQKQDDGRGLVLPGYKYLGPFNGLDKGEPVNAADAAALEHDKAYDQQLQAGDNPYLRYNHADAEFQERLQEDTSFGGNLGRAVFQAKKRVLEPLGLVEEGAKTAPGKKRPVEPSPQRSPDSSTGIGKKGQQPARKRLNFGQTGDSESVPDPQPLGEPPAAPSGVGPNTMAAGGGAPMADNNEGADGVGSSSGNWHCDSQWLGDRVITTSTRTWALPTYNNHLYKQISNSTSGGSSNDNAYFGYSTPWGYFDFNRFHCHFSPRDWQRLINNNWGFRPKRLSFKLFNIQVKEVTQNEGTKTIANNLTSTIQVFTDSEYQLPYVLGSAHQGCLPPFPADVFMIPQYGYLTLNNGSQAVGRSSFYCLEYFPSQMLRTGNNFTFSYTFEDVPFHSSYAHSQSLDRLMNPLIDQYLYYLSRTQTTGGTANTQTLGFSQGGPNTMANQAKNWLPGPCYRQQRVSTTTGQNNNSNFAWTAGTKYHLNGRNSLANPGIAMATHKDDKERFFPSNGILIFGKQNAARDNADYSDVMLTSEEEIKTTNPVATEEYGIVADNLQQQNTAPQIGTVNSQGALPGMVWQNRDVYLQGPIWAKIPHTDGNFHPSPLMGGFGLKHPPPQILIKNTPVPADPPTTFNQSKLNSFITQYSTGQVSVEIEWELQKENSKRWNPEIQYTSNYYKSTSVDFAVNTEGVYSEPHPIGTRYLTRPL

SEQ ID NO: 1160 - protein, 737 aa, Artificial Sequence
  Synthetic polypeptide
MAADGYLPDWLEDNLSEGIREWWDLKPGAPKPKANQQKQDDGRGLVLPGYKYLGPFNGLDKGEPVNAADAAALEHDKAYDQQLKAGDNPYLRYNHADAEFQERLQEDTSFGGNLGRAVFQAKKRVLEPFGLVEEGAKTAPGKKRPVEQSPQEPDSSSGIGKTGQQPAKKRLNFGQTGDSESVPDPQPLGEPPATPAAVGPTTMASGGGAPMQDNNEGADGVGSSSGNWHCDSTWLGDRVITTSTRTWALPTYNNHLYKQISNGTSGGATNDNTYFGYSTPWGYFDFNRFHCHFSPRDWQRLINNNWGFRPKRLNFKLFNIQVKEVTQNEGTKTIANNLTSTIQVFTDSEYQLPYVLGSAHQGCLPPFPADVFMIPQYGYLTLNNGSQAVGRSSFYCLEYFPSQMLRTGNNFTFSYTFEDVPFHSSYAHSQSLDRLMNPLIDQYLYYLSRTQTTGGTANTQTLGFSQGGPNTMANQAKNWLPGPCYRQQRVSTTTGQNNNSNFAWTAGTKYHLNGRNSLANPGIAMATHKDDKERFFPSNGILIFGKQNAARDNADYSDVMLTSEEEIKTTNPVATEEYGIVADNLQQQNTAPQIGTVNSQGALPGMVWQNRDVYLQGPIWAKIPHTDGNFHPSPLMGGFGLKHPPPQILIKNTPVPADPPTTFNQSKLNSFITQYSTGQVSVEIEWELQKENSKRWNPEIQYTSNYYKSTSVDFAVNTEGVYSEPHPIGTRYLTRPL

SEQ ID NO: 1161 - protein, 736 aa, Artificial Sequence
  Synthetic polypeptide
MAADGYLPDWLEDNLSEGIREWWALKPGAPKPKANQQKQDDGRGLVLPGYKYLGPFNGLDKGEPVNAADAAALEHDKAYDQQLKAGDNPYLRYNHADAEFQERLQEDTSFGGNLGRAVFQAKKRVLEPLGLVEEGAKTAPGKKRPVEQSPQEPDSSSGIGKTGQQPAKKRLNFGQTGDSESVPDPQPLGEPPATPAAVGPTTMASGGGAPMADNNEGADGVGSSSGNWHCDSTWLGDRVITTSTRTWALPTYNNHLYKQISSASTGASNDNHYFGYSTPWGYFDFNRFHCHFSPRDWQRLINNNWGFRPKRLNFKLFNIQVKEVTDNNGVKTIANNLTSTVQVFTDSDYQLPYVLGSAHEGCLPPFPADVFMIPQYGYLTLNNGSQAVGRSSFYCLEYFPSQMLRTGNNFTFSYTFEDVPFHSSYAHSQSLDRLMNPLIDQYLYYLSRTQTTGGTANTQTLGFSQGGPNTMANQAKNWLPGPCYRQQRVSTTTGQNNNSNFAWTAGTKYHLNGRNSLANPGIAMATHKDDKERFFPSNGILIFGKQNAARDNADYSDVMLTSEEEIKTTNPVATEEYGIVADNLQQQNTAPQIGTVNSQGALPGMVWQNRDVYLQGPIWAKIPHTDGNFHPSPLMGGFGLKHPPPQILIKNTPVPADPPTTFNQSKLNSFITQYSTGQVSVEIEWELQKENSKRWNPEIQYTSNYYKSTSVDFAVNTEGVYSEPHPIGTRYLTRPL

SEQ ID NO: 1162 - protein, 737 aa, Artificial Sequence
  Synthetic polypeptide
MAADGYLPDWLEDNLSEGIREWWDLKPGAPKPKANQQKQDDGRGLVLPGYKYLGPFNGLDKGEPVNAADAAALEHDKAYDQQLKAGDNPYLRYNHADAEFQERLQEDTSFGGNLGRAVFQAKKRVLEPLGLVEEGAKTAPGKKRPVEPSPQRSPDSSTGIGKKGQQPARKRLNFGQTGDSESVPDPQPLGEPPATPAAVGPTTMASGGGAPMADNNEGADGVGNASGNWHCDSTWLGDRVITTSTRTWALPTYNNHLYKQISSASTGASNDNHYFGYSTPWGYFDFNRFHCHFSPRDWQRLINNNLGSRPKRLNFKLFIIQVKEVTTNDGVTTIANNLTSTVQVFSDSEYQLPYVLGSAHQGCLPPFPADVFMIPQYGYLTLNNGSQAVGRSSFYCLEYFPSQMLRTGNNFTFSYTFEDVPFHSSYAHSQSLDRLMNPLIDQYLYYLNRTQNQSGSAQNKDLLFSRGSPAGMSVQPKNWLPGPCYRQQRVSKTKTDNNNSNFTWTGASKYNLNGRESIINPGTAMASHKDDKDKFFPMSGVMIFGKESAGASNTALDNVMITDEEEIKATNPVATERFGTVAVNLQSSSTDPATGDVHVMGALPGMVWQDRDVYLQGPIWAKIPHTDGHFHPSPLMGGFGLKHPPPQILIKNTPVPANPPAEFSATKFASFITQYSTGQVSVEIEWELQKENSKRWNPEVQYTSNYAKSANVDFTVDNNGLYTEPRPIGTRYLTRPL

SEQ ID NO: 1163 - protein, 736 aa, Artificial Sequence
  Synthetic polypeptide
MAADGYLPDWLEDNLSEGIREWWALKPGAPKPKANQQKQDDGRGLVLPGYKYLGPFNGLDKGEPVNAADAAALEHDKAYDQQLKAGDNPYLRYNHADAEFQERLQEDTSFGGNLGRAVFQAKKRLLEPLGLVEEAAKTAPGKKRPVEQSPQEPDSSSGIGKTGQQPAKKRLNFGQTGDSESVPDPQPIGEPPATPAAVGPTTMASGGGAPMADNNEGADGVGNSSGNWHCDSTWLGDRVITTSTRTWALPTYNNHLYKQISSASTGASNDNHYFGYSTPWGYFDFNRFHCHFSPRDWQRLINNNWGFRPKRLNFKLFNIQVKEVTQNEGTKTIANNLTSTIQVFTDSEYQLPYVLGSAHQGCLPPFPADVFMIPQYGYLTLNNGSQAVGRSSFYCLEYFPSQMLRTGNNFTFSYTFEDVPFHSSYAHSQSLDRLMNPLIDQYLYYLSRTQTTGGTANTQTLGFSQGGPNTMANQAKNWLPGPCYRQQRVSTTTGQNNNSNFAWTAGTKYHLNGRNSLANPGIAMATHKDDKERFFPSNGILIFGKQNAARDNADYSDVMLTSEEEIKTTNPVATEEYGIVADNLQQQNTAPQIGTVNSQGALPGMVWQNRDVYLQGPIWAKIPHTDGNFHPSPLMGGFGLKHPPPQILIKNTPVPADPPTTFNQSKLNSFITQYSTGQVSVEIEWELQKENSKRWNPEIQYTSNYYKSTSVDFAVNTEGVYSDPHPIGTRYLTRPL

SEQ ID NO: 1164 - protein, 736 aa, Artificial Sequence
  Synthetic polypeptide
MAADGYLPDWLEDNLSEGIREWWALKPGAPKPKANQQEQDDGRGLVLPGYKYLGPFNGLDKGEPVNAADAAALEHDKAYDQQLKAGDNPYLRYNHADAEFQERLQEDTSFGGNLGRAVFQAKKRVLEPFGLVEEGAKTAPGKKRPVEQSPQEPDSSSGIGKTGQQPAKKRLNFGQTGDSESVPDPQPLGEPPAAPSGVGPNTMAAGGGAPMADNNEGADGVGSSSGNWHCDSTWLGDRVITTSTRTWALPTYNNHLYKQISSASTGASNDNHYFGYSTPWGYFDFNRFHCHFSPRDWQRLINNNWGFRPKRLNFKLFNIQVKEVTQNEGTKTIANNLTSTIQVFTDSEYQLPYVLGSAHQGCLPPFPADVFMIPQYGYLTLNNGSQAVGRSSFFCLEYFPSQMLRTGNNFTFSYTFEDVPFHSSYAHSQSLDRLMNPLIDQYLYYLSRTQTTGGTANTQTLGFSQGGPNTMANQAKNWLPGPCYRQQRVSTTTGQNNNSNFAWTAGTKYHLNGRNSLANPGIAMATHKDDKERFFPSNGILIFGKQNAARDNADYSDVMLTSEEEIKTTNPVATEEYGIVADNLQQQNTAPQIGTVNSQGALPGMVWQNRDVYLQGPIWAKIPHTDGNFHPSPLMGGFGLKHPPPQILIKNTPVPADPPTTFNQSKLNSFITQYSTGQVSVEIEWELQKENSKRWNPEIQYTSNYYKSTSVDFAVNTEGVYSEPHPIGTRYLTRPL

SEQ ID NO: 1165 - protein, 736 aa, Artificial Sequence
  Synthetic polypeptide
MAADGYLPDWLEDNLSEGIREWWDLKPGAPKPKANQQKQDDGRGLVLPGYKYLGPFNGLDKGEPVNAADAAALEHDKAYDQQLKAGDNPYLRYNHADAEFQERLQEDTSFGGNLGRAVFQAKKRVLEPLGLVEEGAKTAPGKKRPVEQSPQEPDSSSGIGKTGQQPAKKRLNFGQTGDSESVPDPQPLGEPPATPAAVGPTTMASGGGAPMADNNEGADGVGNASGNWHCDSTWLGDRVITTSTRTWALPTYNNHLYKQISSASTGASNDNHYFGYSTPWGYFDFNRFHCHFSPRDWQRLINNNWGFRPKRLNFKLFNIQVKEVTTNDGVTTIANNLTSTVQVFSDSEYQLPYVLGSAHQGCLPPFPADVFMIPQYGYLTLNNGSQAVGRSSFYCLEYFPSQMLRTGNNFTFSYTFEDVPFHSSYAHSQSLDRLMNPLIDQYLYYLNRTQNQSGSAQNKDLLFSRGSPAGMSVQPKNWLPGPCYRQQRVSKTKTDNNNSNFTWTGASKYNLNGRESIINPGTAMASHKDDKDKFFPMSGVMIFGKESAGASNTALDNVMITDEEEIKATNPVATERFGTVAVNLQNSSTDPATGDVHVMGALPGMVWQDRDVYLQGPIWAKIPHTDGHFHPSPLMGGFGLKHPPPQILIKNTPVPANPPAEFSATKFASFITQYSTGQVSVEIEWELQKENSKRWNPEVQYTSNYAKSANVDFTVDNNGLYTVPRPIGTRYLTRPL

SEQ ID NO: 1166 - protein, 736 aa, Artificial Sequence
  Synthetic polypeptide
MAADGYLPDWLEDNLSEGIREWWALKPGAPKPKANQQKQDDGRGLVLPGYKYLGPFNGLDKGEPVNAADAAALEHDKAYDQQLKAGDNPYLRYNHADAEFQERLQEDTSFGGNLGRAVFQAKKRLLEPLGLVEEGAKTAPGKKRPVEQSPQEPDSSSGIGKTGEQPAKKRLNFGQTGDSESVPDPQPLGEPPATPAAVGPTTMASGGGAPMADNNEGADGVGSASGNWHCDSTWLGDRVITTSTRTWALPTYNNHLYKQISSASTGASNDNHYFGYSTPWGYFDFNRFHCHFSPRDWQRLINNNWGFRPKRLNFKLFNIQVKEVTDNNGVKTIANNLTSTIQVFTDSEYQLPYVLGSAHQGCLPPFPADVFMIPQYGYLTLNNGSQAVGRSSFYCLEYFPSQMLRTGNNFPFSYTFEDVPFHSSYAHSQSLDRLMNPLIDQYLYYLSRTQTTGGTANTQTLGFSQGGPNTMANQAKNWLPGPCYRQQRVSTTTGQNNNSNFAWTAGTKYHLNGRNSLANPGIAMATHKDDKERFFPSNGILIFGKQNAARDNADYSDVMLTSEEEIKTTNPVATEEYGIVADNLQQQNTAPQIGTVNSQGALPGMVWQNRDVYLQGPIWAKIPHTDGNFHPSPLMGGFGLKHPPPQILIKNTPVPADPPTTFNQSKLNSFITQYSTGQVSVEIEWELQKENSKRWNPEIQYTSNYYKSTSVDFAVNTEGVYSEPHPIGTRYLTRPL

SEQ ID NO: 1167 - protein, 736 aa, Artificial Sequence
  Synthetic polypeptide
MAADGYLPDWLEDNLSEGIREWWALKPGAPKPKANQQKQDDGRGLVLPGYKYLGPFNGLDKGEPVNAADAAALEHDKAYDQQLKAGDNPYLRYNHADAEFQERLQEDTSFGGNLGRAVFQAKKRVLEPLGLVEEGAKTAPGKKRPVEQSPQEPDSSSGIGKTGQQPAKKRLNFGQTGDSESVPDPQPLGEPPATPAAVGPTTMASGGGAPMADNNEGADGVGSSSGNWHCDSQWLGDRVITTSTRTWALPTYNNHLYKQISSASTGASNDNHYFGYSTPWGYFDFNRFHCHFSPRDWQRLINNNWGFRPKRLNFKLFNIQVKEVTDNNGVKTIANNLTSTVQVFTDSEYQLPYVLGSAHQDCLPPFPADVFMIPQYGYLTLNNGSQAVGRSSFYCLEYFPSQMLRTGNNFTFSYTFEDVPFHSSYAHSQSLDRLMNPLIDQYLYYLSRTQTTGGTANTQTLGFSQGGPNTMANQAKNWLPGPCYRQQRVSTTTGQNNNSNFAWTAGTKYHLNGRNSLANPGIAMATHKDDKERFFPSNGILIFGKQNAARDNADYSDVMLTSEEEIKTTNPVATEEYGIVADNLQQQNTAPQIGTVNSQGALPGMVWQNRDVYLQGPIWAKIPHTDGNFHPSPLMGGFGLKHPPPQILIKNTPVPADPPTTFNQSKLNSFITQYSTGQVSVEIEWELQKENSKRWNPEIQYTSNYYKSTSVDFAVNTEGVYSEPHPIGTRYLTRPL

SEQ ID NO: 1168 - protein, 735 aa, Artificial Sequence
  Synthetic polypeptide
MAADGYLPDWLEDNLSEGIREWWDLKPGAPKPKANQQKQDDGRGLVLPGYKYLGPFNGLDKGEPVNAADAAALEHDKAYDQQLKAGDNPYLRYNHADAEFQERLQEDTSFGGNLGRAVFQAKKRVLEPLGLVEEGAKTAPGKKRPVEQSPQEPDSSSGIGKTGQQPAKKRLNFGQTGDSESVPDPQPLGEPPATPAAVGPTTMASGGGAPMADNNEGADGVGNASGNWHCDSTWLGDVITTSTRTWALPTYNNHLYKQISSASTGASNDNHYFGYSTPWGYFDFNRFHCHFSPRDWQRLINNNWGFRPKRLNFKLFNIQVKEVTQNEGTKTIANNLTSTIQVFTDSEYQLPYVLGSAHQGCLPPFPADVFMIPQYGYLTLNNGSQAVGRSSFYCLEYFPSQMLRTGNNFQFTYTFEDVPFHSSYAHSQSLDRLMNPLIDQYLYYLSRTQTTGGTANTQTLGFSQGGPNTMANQAKNWLPGPCYRQQRVSTTTGQNNNSNFAWTAGTKYHLNGRNSLANPGIAMATHKDDKERFFPSNGILIFGKQNAARDNADYSDVILTSEEEIKTTNPVATEEYGIVADNLQQQNTAPQIGTVNSQGALPGMVWQNRDVYLQGPIWAKIPHTDGNFHPSPLMGGFGLKHPPPQILIKNTPVPADPPTTFNQSKLNSFITQYSTGQVSVEIEWELQKENSKRWNPEIQYTSNYYKSTSVDFAVNTEGVYSEPHPIGTRYLTRPL

SEQ ID NO: 1169 - protein, 736 aa, Artificial Sequence
  Synthetic polypeptide
MAADGYLPDWLEDTLSEGIRQWWKLKPGPPPPKPAERHKDDSRGLVLPGYKYLGPFNGLDKGEPVNEADAAALEHDKAYDRQLDSGDNPYLKYNHADAEFQERLKEDTSFGGNLGRAVFQAKKRVLEPFGLVEEGAKTAPGKKRPVEQSPQEPDSSSGIGKTGQQPAKKRLNFGQTGDSESVPDPQPLGEPPATPAAVGPTTMASGGGAPMADNNEGADGVGNASGNWHCDSTWLGDRVITTSTRTWALPTYNNHLYKQISSTSTGASNDNHYFGYSTPWGYFDFNRFHCHFSPRDWQRLINNNWGFRPKRLNFKLFNIQVKEVTDNNGVKTIANNLTSTVQVFTDSEYQLPYVLGSAHQGCLPPFPADVFMIPQYGYLTLNNGSQAVGRSSFYCLEYFPSQMLRTGNNFTFSYTFEDVPFHSSYAHSQSLDRLMNPLIDQYLYYLSRTQTTGGTANTQTLGFSQGGPNTMANQAKNWLPGPCYRQQRVSTTTGQNNNSNFAWTAGTKYHLNGRNSLANPGIAMATHKDDKERFFPSNGILIFGKQNAARDNADYSDVMLTSEEEIKTTNPVATEEYGIVADNLQQQNTAPQIGTVNSQGALPGMVWQNRDVYLQGPIWAKIPHTDGNFHPSPLMGGFGLKHPPPQILIKNTPVPADPPTTFNQSKLNSFITQYSTGQVSVEIEWELQKENSKRWNPEIQYTSNYYKSTSVDFAVNTEGVYSEPHPIGTRYLTRPL

SEQ ID NO: 1170 - protein, 735 aa, Artificial Sequence
  Synthetic polypeptide
MAADGYLPDWLEDNLSEGIREWWDLKPGAPKPKANQQKQDDGRGLVLPGYKYLGPFNGLDKGEPVNAADAAALEHDKAYDRQLDSGDNPYLRYNHADAEFQERLKEDTSFGGNLGRAVFQAKKRVLEPFGLVEEGAKTAPGKKRPVEQSPQEPDSSSGIGKTGQQPAKKRLNFGQTGDSESVPDPQPLGEPPATPAAVGPTTMASGGGAPMADNNEGADGVGNASGNWHCDSTWLGDRVITTSTRTWALPTYNNHLYKQISSASTGASNDNHYFGYSTPWGYFDFNRFHCHFSPRDWQRLINNNWGFRPKRLNFKLFNIQVKEVTQNEGTKTIANNLTSTIQVFTDSEYQLPYVLGSAHQGCLPPFPADVFMIPQYGYLTLNNGSQAVGRSSFYCLEYFPSQMLRTGNNFQFTYTFEDVPFHSSYAHSQSLDRLMNPLIDQYLYYLSRTQTTGGTANTQTLGFSQGGPNTMANQAKNWLPGPCYRQQRVSTTTGQNNNSNFAWTAGTKYHLNGRNSLANPGIAMATHKDDRSVFFQYRDPDFGKQNAARDNADYSDVMLTSEEEIKTTNPVATEEYGIVADNLQQQNTAPQIGTVNSQGALPGMVWQNRDVYLQGPIWAKIPHTDGNFHPSPLMGGFGLKHPPPQILIKNTPVPADPPTTFNQSKLNSFITQYSTGQVSVEIEWELQKENSKRWNPEIQYTSNYYKSTSVDFAVNTEGVYSEPHPIGTRYLTRPL

SEQ ID NO: 1171 - protein, 736 aa, Artificial Sequence
  Synthetic polypeptide
MAADGYLPDWLEDNLSEGIREWWALKPGAPKPKANQQKQDDGRGLVLPGYKYLGPFNGLDKGEPVNAADAAALEHDKAYDQQLKAGDNPYLKYNHADAEFQERLQGDTSFGGNLGRAVFQAKKRVLEPLGLVEEAAKTAPGKKRPVEQSPQEPDSSAGIGKSGAQPAKKRLNFGQTGDTESVPDPQPLGEPPAAPSGVGPNTMAAGGGAPMADNNEGADGVGSSSGNWHCDSQWLGDRVITTSTRTWALPTYNNHLYKQISSASTGASNDNHYFGYSTPWGYFDFNRFHCHFSPRDWQRLINNNWGFRPKRLNFKLFNIQVKEVTDNNGVKTIANNLTSTVQVFTDSDYQLPYVLGSAHEGCLPPFPADVFMIPQYGYLTLNNGSQAVGRSSFYCLEYFPSQMLRTGNNFQFTYTFEDVPFHSSYAHSQSLDRLMNPLIDQYLYYLSRTQTTGGTANTQTLGFSQGGPNTMANQAKNWLPGPCYRQQRVSTTTGQNNNSNFAWTAGTKYHLNGRNSLANPGIAMATHKDDKERFFPSNGILIFGKQNAARDNADYSDVMLTSEEEIKTTNPVATEEYGIVADNLQQQNTAPQIGTVNSQGALPGMVWQNRDVYLQGPIWAKIPHTDGNFHPSPLMGGFGLKHPPPQILIKNTPVPADPPTTFNQSKLNSFITQYSTGQVSVEIEWELQKENSKRWNPEIQYTSNYYKSTSVDFAVNTEGVYSEPHPIGTRYLTRPL

SEQ ID NO: 1172 - protein, 736 aa, Artificial Sequence
  Synthetic polypeptide
MAADGYLPDWLEDTLSEGIRQWWKLKPGPPPPKPAERHKDDSRGLVLPGYKYLGPFNGLDKGEPVNEADAAALEHDKAYDRQLDSGDNPYLKYNHADAEFQERLKEDTSFGGNLGRAVFQAKKRVLEPFGLVEEAAKTAPGKKRPVEQSPQEPDSSSGIGKTGQQPAKKRLNFGQTGDSESVPDPQPLGEPPATPAAVGPTTMASGGGAPMADNNEGADGVGNASGNWHCDSTWLGDRVITTSTRTWALPTYNNHLYKQISSASTGASNDNHYFGYSTPWGYFDFNRFHCHFSPRDWQRLINNNWGFRPKRLNFKLFNIQVKEVTDNNGVKTIANNLTSTVQVFTDSDYQLPYVLGSAHEGCLPPFPADVFMIPQYGYLTLNNGSQAVGRSSFYCLEYFPSQMLRTGNNFTFSYTFEDVPFHSSYAHSQSLDRLMNPLIDQYLYYLSRTQTTGGTANTQTLGFSQGGPNTMANQAKNWLPGPCYRQQRVSTTTGQNNNSNFAWTAGTKYHLNGRNSLANPGIAMATHKDDKERFFPSNGILIFGKQNAARDNADYSDVMLTSEEEIKTTNPVATEEYGIVADNLQQQNTAPQIGTVNSQGALPGMVWQNRDVYLQGPIWAKIPHTDGNFHPSPLMGGFGLKHPPPQILIKNTPVPADPPTTFNQSKLNSFITQYSTGQVSVEIEWELQKENSKRWNPEIQYTSNYYKSTSVDFAVNTEGVYSEPHPIGTRYLTRPL

SEQ ID NO: 1173 - protein, 736 aa, Artificial Sequence
  Synthetic polypeptide
MAADGYLPDWLEDNLSEGIREWWALKPGAPKPKANQQKQDDGRGLVLPGYKYLGPFNGLDKGEPVNAADAAALEHDKAYDQQLKAGDNPYLRYNHADAEFQERLQEDTSFGGNLGRAVFQAKKRVLEPLGLVEEGAKTAPGKKRPVEQSPQEPDSSSGIGKTGQQPAKKRLNFGQTGDSESVPDPQPLGEPPATPAAVGPTTMASGGGAPMADNNEGADGVGSSSGNWHCDSTWLGDRVITTSTRTWALPTYNNHLYKQISSASTGASNDNHYFGYSTPWGYFDFNRFHCHFSPRDWQRLINNNWGFRPKRLNFKLFNIQVKEVTDNNGVKTIANNLTSTVQVFTDSEYQLPYVLGSAHQGCLPPFPADVFMIPQYGYLTLNNGSQAVGRSSFYCLEYFPSQMLRTGNNFTFSYTFEDVPFHSSYAHSQSLDRLMNPLIDQYLYYLSRTQTTGGTANTQTLGFSQGGPNTMANQAKNWLPGPCYRQQRVSTTTGQNNNSNFAWTAGTKYHLNGRNSLANPGIAMATHKDDKERFFPSNGILIFGKQNAARDNADYSDVMLTSEEEIKTTNPVATEEYGIVADNLQQQNTAPQIGTVNSQGALPGMVWQNRDVYLQGPIWAKIPHTDGNFHPSPLMGGFGLKHPPPQILIKNTPVPADPPTTFNQSKLNSFITQYSTGQVSVEIEWELQKENSKRWNPEIQYTSNYYKSTSVDFAVNTEGVYSEPHPIGTRYLTRPL

SEQ ID NO: 1174 - protein, 737 aa, Artificial Sequence
  Synthetic polypeptide
MAADGYLPDWLEDNLSEGIREWWALKPGAPKPKANQQKQDDGRGLVLPGYKYLGPFNGLDKGEPVNAADAAALEHDKAYDQQLKAGDNPYLRYNHADAEFQERLQEDTSFGGNLGRAVFQAKKRVLEPLGLVEEGAKTAPGKKRPVEQSPQEPDSSSGIGKTGQQPAKKRLNFGQTGDTESVPDPQPIGEPPAAPSGVGSLTMASGGGAPVADNNEGADGVGSSSGNWHCDSQWLGDRVITTSTRTWALPTYNNHLYKQISNSTSGGSSNDNAYFGYSTPWGYFDFNRFHCHFSPRDWQRLINNNWGFRPKRLNFKLFNIQVKEVTQNEGTKTIANNLTSTIQVFTDSEYQLPYVLGSAHQGCLPPFPADVFMIPQYGYLTLNNGSQAVGRSSFYCLEYFPSQMLRTGNNFQFTYTFEDVPFHSSYAHSQSLDRLMNPLIDQYLYYLSRTQTTGGTANTQTLGFSQGGPNTMANQAKNWLPGPCYRQQRVSTTTGQNNNSNFAWTAGTKYHLNGRNSLANPGIAMATHKDDKERFFPSNGILIFGKQNAARDNADYSDVMLTSEEEIKTTNPVATEEYGIVADNLQQQNTAPQIGTVNSQGALPGMVWQNRDVYLQGPIWAKIPHTDGNFHPSPLMGGFGLKHPPPQILIKNTPVPADPPTTFNQSKLNSFITQYSTGQVSVEIEWELQKENSKRWNPEIQYTSNYYKSTSVDFAVNTEGVYSEPHPIGTRYLTRPL

SEQ ID NO: 1175 - protein, 736 aa, Artificial Sequence
  Synthetic polypeptide
MAADGYLPDWLEDNLSEGIREWWALKPGAPKPKANQQKQDDGRGLVLPGYKYLGPFNGLDKGEPVNAADAAALEHDKAYDQQLKAGDNPYLKYNHADAEFQERLQGDTSFGGNLGRAVFQAKKRVLEPLGLVEEAAKTAPGKKRPVEQSPQEPDSSAGIGKSGAQPAKKRLNFGQTGDTESVPDPQPLGEPPAAPSGVGPNTMAAGGGAPMADNNEGADGVGSSSGNWHCDSQWLGDRVITTSTRTWALPTYNNHLYKQISSASTGASNDNHYFGYSTPWGYFDFNRFHCHFSPRDWQRLINNNWGFRPKRLNFKLFNIQVKEVTDNNGVKTIANNLTSTVQVFTDSEYQLPYVLGSAHQGCLPPFPADVFMIPQYGYLTLNNGSQAVGRSSFYCLEYFPSQMLRTGNNFTFSYTFEDVPFHSSYAHSQSLDRLMNPLIDQYLYYLSRTQTTGGTANTQTLGFSQGGPNTMANQAKNWLPGPCYRQQRVSTTTGQNNNSNFAWTAGTKYHLNGRNSLANPGIAMATHKDDKERFFPSNGILIFDKQNAARDNADYSDVMLTSEEEIKTTNPVATEEYGIVADNLQQQNTAPQIGTVNSQGALPGMVWQNRDVYLQGPIWAKIPHTDGNFHPSPLMGGFGLKHPPPQILIKNTPVPADPPTTFNQSKLNSFITQYSTGQVSVEIEWELQKENSKRWNPEIQYTSNYYKSTSVDFAVNTEGVYSEPHPIGTRYLTRPL

SEQ ID NO: 1176 - protein, 736 aa, Artificial Sequence
  Synthetic polypeptide
MAADGYLPDWLEDTLSEGIRQWWKLKPGPPPPKPAERHKDDSRGLVLPGYKYLGPFNGLDKGEPVNEADAAALEHDKAYDRQLDSGDNPYLKYNHADAEFQERLKEDTSFGGNLGRAVFQAKKRVLEPLGLVEEPVKTAPGKKRPVEHSPVEPDSSSGTGKAGQQPARKRLNFGQTGDSESVPDPQPLGEPPATPAAVGPNTMATGSGAPMADNNEGADGVGNSSGNWHCDSTWMGDRVITTSTRTWALPTYNNHLYKQISSASTGASNDNHYFGYSTPWGYFDFNRFHCHFSPRDWQRLINNNWGFRPKRLNFKLFNIQVKEVTDNNGVKTIANNLTSTIQVFTDSEYQLPYVLGSAHQGCLPPFPADVFMIPQYGYLTLNNGSQAVGRSSFYCLEYFPSQMLRTGNNFTFSYTFEDVPFHSSYAHSQSLDRLMNPLIDQYLYYLSRTQTTGGKANTQTLGFSQGGPNTMANQAKNWLPGPCYRQQRVSTTTGQNNNSNFAWTAGTKYHLNGRNSLANPGIAMATHKDDKERFFPSNGILIFGKQNAARDNADYSDVMLTSEEEIKTTNPVATEEYGIVADNLQQQNTAPQIGTVNSQGALPGMVWQNRDVYLQGPIWAKIPHTDGNFHPSPLMGGFGLKHPPPQILIKNTPVPADPPTTFNQSKLNSFITQYSTGQVSVEIEWELQKENSKRWNPEIQYTSNYYKSTSVDFAVNTEGVYSEPHPIGTRYLTRPL

SEQ ID NO: 1177 - protein, 736 aa, Artificial Sequence
  Synthetic polypeptide
MAADGYLPDWLEDNLSEGIREWWALKPGAPKPKANQQKQDDGRGLVLPGYKYLGPFNGLDKGEPVNAADAAALEHDKAYDQQLKAGDNPYLRYNHADAEFQERLQEDTSFGGNLGRAVFQAKKRVLEPFGLVEEGAKTAPGKKRPVEQSPQEPDSSSGIGKTGQQPAKKRLNFGQTGDSESVPDPQPLGEPPATPAAVGPTTMASGGGAPMADNNEGADGVGNASGNWHCDSTWLGDRVITTSTRTWALPTYNNHLYKQISSASTGASNDNHYFGYSTPWGYFDFNRFHCHFSPRDWQRLINNNWGFRPKRLNFKLFNIQVKEVTDNNGVKTIANNLTSTVQVFTDSEYQLPYVLGSAHQGCLPPFPADVFMIPQYGYLTLNNGSQAVGRSSFYCLEYFPSQMLRTGNNFTFSYTFEDVPFHSSYAHSQSLDRLMNPLIDQYLYYLSRTQTTGGTGNTQTLGFSQGGPNTMANQAKNWLPGPCYRQQRVSTTTGQNNNSNFAWTAGTKYHLNGRNSLANPGIAMATHKDDKERFFPSNGILIFGKQNAARDNADYSDVMLTSEEEIKTTNPVATEEYGIVADNLQQQNTAPQIGTVNSQGALPGMVWQNRDVYLQGPIWAKIPHTDGNFHPSPLMGGFGLKHPPPQILIKNTPVPADPPTTFNQSKLNSFITQYSTGQVSVEIEWELQKENSKRWNPEIQYTSNYYKSTSVDFAVNTEGVYSEPHPIGTRYLTRPL

SEQ ID NO: 1178 - protein, 736 aa, Artificial Sequence
  Synthetic polypeptide
MAADGYLPDWLEDNLSEGIREWWDLKPGAPKPKANQQKQDDGRGLVLPGYKYLGPFNGLDKGEPVNAADAAALEHDKAYDQQLKAGDNPYLRYNHADAEFQERLQEDTSFGGNLGRAVFQAKKRVLEPLGLVEEGAKTAPGKKRPVEQSPQEPDSSSGIGKTGQQPAKKRLNFGQTGDSESVPDPQPLGEPPATPAAVGPTTMASGGGAPMADNNEGADGVGSSSGNWHCDSTWLGDRVITTSTRTWALPTYNNHLYKQISSASTGASNDNHYFGYSTPWGYFDFNRFHCHFSPRDWQRLINNNWGFRPKRLNFKLFNIQVKEVTQNEGTKTIANNLTSTIQVFTDSEYQLPYVLGSAHQGCLPPFPADVFMIPQYGYLTLNNGSQAVGRSSFYCLEYFPSQMLRTGNNFTFSYTFEDVPFHSSYAHSQSLDRLMNPLIDQYLYYLSRTQTTGGTANTQTLGFSQGGPNTMANQAKNWLPGPCYRQQRVSTTTGQNNNSNFAWTAGTKYHLNGRNSLANPGIAMATHKDDKERFFPSNGILIFGKQNAARDNADYSDVMLTSEEEIKTTNPVATEEYGIVADNLQQQNTAPQIGTVNSQGALPGMVWQNRDVYLQGPIWAKIPHTDGNFHPSPLMGGFGLKHPPPQILIKNTPVPADPPTTFNQSKLNSFITQYSTGQVSVEIEWELQKENSKRWNPEIQYTSNYYKSTSVDFAVNTEGVYSEPHPIGTRYLTRPL

SEQ ID NO: 1179 - protein, 736 aa, Artificial Sequence
  Synthetic polypeptide
MAADGYLPDWLEDNLSEGIREWWALKPGAPKPKANQQKQDDGRGLVLPGYKYLGPFNGLDKGEPVNAADAAALEHDKAYDQQLKAGDNPYLRYNHADAEFQERLQEDTSFGGNLGRAVFQAKKRVLEPLGLVEEGAKTAPGKKRPVEQSPQEPDSSSGIGKTGQQPAKKRLNFGQTGDSESVPDPQPLGEPPATPAAVGPTTMAAGGGAPMADNNEGADGVGSSSGNWHCDSTWMGDRVITTSTRTWALPTYNNHLYKQISSASTGASNDNHYFGYSTPWGYFDFNRFHCHFSPRDWQRLINNNWGFRPKRLSFKLFNIQVKEVTQNEGTKTIANNLTSTIQVFTDSEYQLPYVLGSAHQGCLPPFPADVFMIPQYGYLTLNNGSQAVGRSSFYCLEYFPSQMLRTGNNFTFSYTFEDVPFHSSYAHSQSLDRLMNPLIDQYLYYLSRTQTTGGTANTQTLGFSQGGPNTMANQAKNWLQGPCYRQQRVSTTTGQNNNSNFAWTAGTKYHLNGRNSLANPGIAMATHKDDKERFFPSNGILIFGKQNAARDNADYSDVMLTSEEEIKTTNPVATEEYGIVADNLQQQNTAPQIGTVNSQGALPGMVWQNLDVYLQGPIWAKIPHTDGNFHPSPLMGGFGLKHPPPQILIKNTPVPADPPTTFNQSKLNSFITQYSTGQVSVEIEWELQKENSKRWNPEIQYTSNYYKSTSVDFAVNTEGVYSEPHPIGTRYLTRPL

SEQ ID NO: 1180 - protein, 737 aa, Artificial Sequence
  Synthetic polypeptide
MAADGYLPDWLEDNLSEGIREWWALKPGAPKPKANQQKQDDGRGLVLPGYKYLGPFNGLDKGEPVNAADAAALEHDKAYDQQLKAGDNPYLRYNHADAEFQERLQEDTSFGGNLGRAVFQAKKRVLEPLGLVEEGAKTAPGKKRPVEPSPQRSPDSSSGIGKTGQQPAKKRLNFGQTGDSESVPDPQPLGEPPATPAAVGPTTMASGGGAPMADNNEGADGVGNASGNWHCDSQWLGDRVITTSTRTWALPTYNNHLYKQISSASTGASNDNHYFGYSTPWGYFDFNRFHCHFSPRDWQRLINNNWGFRPKRLNFKLFNIQVKEVTDNNGVKTIANNLTSTVQVFTDSDYQLPYVLGSAHEGCLPPFPADVFMIPQYGYLTLNNGSQAVGRSSFYCLEYFPSQMLRTGNNFQFTYTFEDVPFHSSYAHSQSLDRLMNPLIDQYLYYLSRTQTTGGTANTQTLGFSQGGPNTMANQAKNWVPGPCYRQQRVSTATGQNNNSNFAWTAGTKYHLKGRNSLANPGIAMATHKDDKERFFPSNGILIFGKQNAARDNADYSDVMLTSEEEIKTTNPVATEEYGIVADNLQQQNTAPQIGTVNSQGALPGMVWQNRDVYLQGPIWAKIPHTDGNFHPSPLMGGFGLKHPPPQILIKNTPVPADPPTTFNQSKLNSFITQYSTGQVSVEIEWELQKENSKRWNPEIQYTSNYYKSTSVDFAVNTEGVYSEPHPIGTRYLTRPL

SEQ ID NO: 1181 - protein, 737 aa, Artificial Sequence
  Synthetic polypeptide
  MOD_RES (226)..(226): Any naturally occurring amino acid
  MOD_RES (233)..(233): Any naturally occurring amino acid
  MOD_RES (239)..(239): Any naturally occurring amino acid
  MOD_RES (250)..(250): Any naturally occurring amino acid
  MOD_RES (253)..(253): Any naturally occurring amino acid
  MOD_RES (255)..(255): Any naturally occurring amino acid
MAADGYLPDWLEDTLSEGIRQWWKLKPGPPPPKPAERHKDDSRGLVLPGYKYLGPFNGLDKGEPVNEADAAALEHDKAYDRQLDSGDNPYLKYNHADAEFQERLKEDTSFGGNLGRAVFQAKKRVLEPLGLVEEGAKTAPGKKRPVEQSPQEPDSSSGIGKTGQQPAKKRLNFGQTGDSESVPDPQPLGEPPATPSGVGPNTMAAGGGAPMADNNEGADGVGSSSXNWHCDSXWLGDRXITTSTRTWALXTYXNXLYKQISNSTSGGATNDNTYFGYSTPWGYFDFNRFHCHFSPRDWQRLINNNWGFRPKRLNFKLFNIQVKEVTQNEGTKTIANNLTSTIQVFTDSEYQLPYVLGSAHQGCLPPFPADVFMIPQYGYLTLNNGSQAVGRSSFYCLEYFPSQMLRTGNNFQFTYTFEDVPFHSSYAHSQSLDRLMNPLIDQYLYYLSRTQTTGGTANTQTLGFSQGGPNTMANQAKNWLPGPCYRQQRVSTTTGQNNNSNFAWTAGTKYHLNGRNSLANPGIAMATHKDDKERFFPSNGILIFGKQNAARDNADYSDVMLTSEEEIKTTNPVATEEYGIVADNLQQQNTAPQIGTVNSQGALPGMVWQNRDVYLQGPIWAKIPHTDGNFHPSPLMGGFGLKHPPPQILIKNTPVPADPPTTFSQAKLASFITQYSTGQVSVEIEWELQKENSKRWNPEVQYTSNYAKSANVDFTVDNNGLYTEPRPIGTRYLTRPL

SEQ ID NO: 1182 - protein, 737 aa, Artificial Sequence
  Synthetic polypeptide
MAADGYLPDWLEDNLSEGIREWWDLKPGAPKPKANQQKQDDGRGLVLPGYKYLGPFNGLDKGEPVNAADAAALEHDKAYDQQLKAGDNPYLRYNHADAEFQERLQEDTSFGGNLGRAVFQAKKRVLEPLGLVEEGAKTAPGKKRPVEPSPQRSPDSSTGIGKKGQQPAKKRLNFGQTGDSESVPDPQPIGEPPAGPSGVGSLTMASGGGAPVADNNEGADGVGSSSGNWHCDSQWLGDRVITTSTRTWALPTYNNHLYKQISSASTGASNDNHYFGYSTPWGYFDFNRFHCHFSPRDWQRLINNNWGFRPKRLNFKLFNIQVKEVTDNDGVKTIANNLTSTIQVFTDSEYQLPYVLGSAHQGCLPPFPADVFMIPQYGYLTLNNGSQAVGRSSFYCLEYFPSQMLRTGNNFTFSYTFEDVPFHSSYAHSQSLDRLMNPLIDQYLYYLSRTQTTGGTANTQTLGFSQGGPNTMANHAKNWLPGPCYRQQRVSTTTGQNNNSNFAWTAGTKYHLNGRNSLANPGIAMATHKDDKERFFPSNGILIFGKQNAARDNADYSDVMLTSEEEIKTTNPVATEEYGIVADNLQQQNTAPQIGTVNSQGALPGMVWQNRDVYLQGPIWAKIPHTDGNFHPSPLMGGFGLKHPPPQILIKNTPVPADPPTTFNQSKLNSFITQYSTGQVSVEIEWELQKENSKRWNPEIQYTSNYYKSTSVDFAVNTEGVYSEPHPIGTRYLTRPL

SEQ ID NO: 1183 - protein, 736 aa, Artificial Sequence
  Synthetic polypeptide
MAADGYLPDWLEDTLSEGIRQWWKLKPGPPPPKPAERHKDDSRGLVLPGYKYLGPFNGLDKGEPVNEADAAALEHDKAYDRQLDSGDNPYLKYNHADAEFQERLKEDTSFGGNLGRAVFQAKKRVLEPLGLVEEPVKTAPGKKRPVEHSPVEPDSSSGTGKAGQQPAKKRLNFGQTGDSESVPDPQPLGEPPATPAAVGPTTMASGGGAPMADNNEGADGVGNASGNWHCDSTWLGDRVITTSTRTWALPTYNNHLYKQISSASTGASNDNHYFGYSTPWGYFDFNRFHCHFSPRDWQRLINNNWGFRPKRLNFKLFNIQVKEVTQNEGTKTIANNLTSTIQVFTDSEYQLPYVLGSAHQGCLPPFPADVFMIPQYGYLTLNNGSQAVGRSSFYCLEYFPSQMLRTGNNFQFTYTFEDVPFHSSYAHSQSLDRLMNPLIDQYLYYLSRTQTTGGTANTQTLGFSQGGPNTMANQAKNWLPGPCYRQQRVSTTTGQNNNSNFAWTAGTKYHLNGRNSLANPGIAMATHKDDKERFFPSNGILIFGKQNAARDNADYSDVMLTSEEEIKTTNPVATEEYGIVADNLQQQNTAPQIGTVNSQGALPGMVWQNRDVYLQGPIWAKIPHTDGNFHPSPLMGGFGLKHPPPQILIKNTPVPADPPTTFNQSKLNSFITQYSTGQVSVEIEWELQKENSKRWNPEIQYTSNYYKSTSVDFAVNTEGVYSEPHPIGTRYLTRPL

SEQ ID NO: 1184 - protein, 736 aa, Artificial Sequence
  Synthetic polypeptide
MAADGYLPDWLEDNLSEGIREWWALKPGAPKPKANQQKQDDGRGLVLPGYKYLGPFNGLDKGEPVNAADAAALEHDKAYDQQLQAGDNPYLRYNHADAEFQERLQGDTSFGGNLGRAVFQAKKRVLEPLGLVEEGAKTAPGKKRPVEQSPQEPDSSSGIGKTGQQPAKKRLNFGQTGDSESVPDPQPLGEPPATPAAVGPTTMASGGGAPMADNNEGADGVGNASGNWHCDSTWLGDRVITTSTRTWALPTYNNHLYKQISSASTGASNDNHYFGYSTPWGYFDFNRFHCHFSPRDWQRLINNNWGFRPKRLNFKLFNIQVKEVTDNNGVKTIANNLTSTIQVFTDSEYQLPYVLGSAHQGCLPPFPADVFMIPQYGYLTLNNGSQAVGRSSFYCLEYFPSQMLRTGNNFQFTYTFEDVPFHSSYAHSQSLDRLMNPLIDQYLYYLSRTQTTGGTANTQTLGFSQGGPNTMANQAKNWLPGPCYRQQRVSTTTGQNNNSNFAWTAGTKYHLNGRNSLANPGIAMATHKDDKERFFPSNGILIFGKQNAARDNADYSDVMLTSEEEIKTTNPVATEEYGIVADNLQQQNTAPQIGTVNSQGALPGMVWQNRDVYLQGPIWAKIPHTDGNFHPSPLMGGFGLKHPPPQILIKNTPVPADPPTTFNQSKLNSFITQYSTGQVSVEIEWELQKENSKRWNPEIQYTSNYYKSTSVDFAVNTEGVYSEPHPIGTRYLTRPL

SEQ ID NO: 1185 - protein, 738 aa, Artificial Sequence
  Synthetic polypeptide
MAADGYLPDWLEDTLSEGIRQWWKLKPGPPPPKPAERHKDDSRGLVLPGYKYLGPFNGLDKGEPVNAADAAALEHDKAYDQQLKAGDNPYLRYNHADAEFQERLKEDTSFGGNLGRAVFQAKKRVLEPLGLVEEGAKTAPGKKRPVEPSPQRSPDSSTGIGKKGQQPARKRLNFGQTGDSESVPDPQPLGEPPAAPSGVGPNTMAAGGGAPMADNNEGADGVGSSSGNWHCDSQWLGDRVITTSTRTWALPTYNNHLYKQISNSTSGGSSNDNAYFGYSTPWGYFDFNRFHCHFSPRDWQRLINNNWGFRPKRLNFKLFNIQVKEVTDNNGVKTIANNLTSTVQVFTDSEYQLPYVLGSAHQGCLPPFPADVFMIPQYGYLTLNNGSQAVGRSSFYCLEYFPSQMLRTGNNFTFSYTFEDVPFHSSYAHSQSLDRLMNPLIDQYLYYLSRTQTTGGTANTQTLGFSQGGPNTMANQAKNWLPGPCYRQQRVSTTTGQNNNSNFAWTAGTKYHLNGRNSLANPGIAMATHKDDKERFFPSNGILIFGKQNAARDNADYSDVMLTSEEEIKTTNPVATEEYGIVADNLQQQNTAPQIGTVNSQGALPGMVWQNRDVYLQGPIWAKIPHTDGHFHPSPLMGGFGLKHPPPQILIKNTPVPANPPTTFNQSKLNSFITQYSTGQVSVEIEWELQKENSKRWNPEVQYTSNYAKSANVDFTVDNNGLYTEPRPIGTRYLTRPL

SEQ ID NO: 1186 - protein, 738 aa, Artificial Sequence; identical to SEQ ID NO: 1185
  Synthetic polypeptide

SEQ ID NO: 1187 - protein, 736 aa, Artificial Sequence
  Synthetic polypeptide
MAADGYLPDWLEDNLSEGIREWWALKPGAPKPKANQQKQDDGRGLVLPGYKYLGPFNGLDKGEPVNAADAAALEHDKAYDQQLKAGDNPYLRYNHADAEFQERLQEDTSFGGNLGRAVFQAKKRLLEPLGLVEEGAKTAPGKKRPVEQSPQEPDSSSGIGKTGQQPAKKRLNFGQTGDSESVPDPQPLGEPPATPAAVGPTTMASGGGAPMADNNEGADGVGNSSGNWHCDSTWMGDRVITTSTRTWALPTYNNHLYKQISSASTGASNDNHYFGYSTPWGYFDFNRFHCHFSPRDWQRLINNNWGFRPKRLNFKLFNIQVKEVTQNEGTKTIANNLTSTIQVFTDSEYQLPYVLGSAHQGCLPPFPADVFIIPQYGYLTLNNGSQAVGRSSFYCLEYFPSQMLRTGNNFTFSYTFEDVPFHSSYAHSQSLDRLMNPLIDQYLYYLSRTQTTGGTANTQTLGFSQGGPNTMANQAKNWLPGPCYRQQRVSTTTGQNNNSNFAWTAGTKYHLNGRNSLANPGIAMATHKDDKERFFPSNGILIFGKQNAARDNADYSDVMLTSEEEIKTTNPVATEEYGIVADNLQQQNTAPQIGTVNSQGALPGMVWQNRDVYLQGPIWAKIPHTDGNFHPSPLMGGFGLKHPPPQILIKNTPVPADPPTTFNQSKLNSFITQYSTGQVSVEIEWELQKENSKRWNPEIQYTSNYYKSTSVDFAVNTEGVYSEPHPIGTRYLTRPL

SEQ ID NO: 1188 - protein, 736 aa, Artificial Sequence
  Synthetic polypeptide
MAADGYLPDWLEDNLSEGIREWWALKPGAPKPKANQQKQDDGRGLVLPGYKYLGPFNGLDKGEPVNAADAAALEHDKAYDQQLKAGDNPYLRYNHADAEFQERLQEDTSFGGNLGRAVFQAKKRVLEPFGLVEEAAKTAPGKKRPVEQSPQEPDSSSGIGKTGQQPAKKRLNFGQTGDSESVPDPQPLGEPPATPAAVGPTTMASGGGAPMADNNEGADGVGNASGNWHCDSTWLGDRVITTSTRTWALPTYNNHLYKQISSASTGASNDNHYFGYSTPWGYFDFNRFHCHFSPRDWQRLINNNWGFRPKRLNFKLFNIQVKEVTQNEGTKTIANNLTSTIQVFTDSEYQLPYVLGSAHQGCLPPFPADVFMIPQYGYLTLNNGSQAVGRSSFYCLEYFPSQMLRTGNNFTFSYTFEDVPFHSSYAHSQSLDRLMNPLIDQYLYYLSRTQTTGGTANTQTLGFSQGGPNTMANHAKNWLPGPCYRQQRVSTTTGQNNNSNFAWTAGTKYHLNGRNSLANPGIAMATHKDDKERFFPSNGILIFGKQNAARDNADYSDVMLTSEEEIKTTNPVATEEYGIVADNLQQQNTAPQIGTVNSQGALPGMVWQNRDVYLQGPIWAKIPHTDGNFHPSPLMGGFGLKHPPPQILIKNTPVPADPPTTFNQSKLNSFITQYSTGQVSVEIEWELQKENSKRWNPEIQYTSNYYKSTSVDFAVNTEGVYSEPHPIGTRYLTRPL

SEQ ID NO: 1189 - protein, 736 aa, Artificial Sequence
  Synthetic polypeptide
MAADGYLPDWLEDNLSEGIREWWALKPGAPKPKANQQKQDDGRGLVLPGYKYLGPFNGLDKGEPVNEADAAALEHDKAYDQQLKAGDNPYLRYNHADAEFQERLQEDTSFGGNLGRAVFQAKKRLLEPLGLVEEAAKTAPGKKRPVEQSPQEPDSSAGIGKSGAQPAKKRLNFGQTGDSESVPDPQPLGEPPATPAAVGPTTMASGGGAPMADNNEGADGVGNASGNWHCDSTWLGDRVITTSTRTWALPTYNNHLYKQISSASTGASNDNHYFGYSTPWGYFDFNRFHCHFSPRDWQRLINNNWGFRPKRLNFKLFNIQVKEVTDNDGVKTIANNLTSTIQVFTDSEYQLPYVLGSAHQGCLPPFPADVFMIPQYGYLTLNNGSQAVGRSSFYCLEYFPSQMLRTGNNFQFTYTFEDVPFHSSYAHSQSLDRLMNPLIDQYLYYLSRTQTTGGTANTQTLGFSQGGPNTMANQAKNWLPGPCYRQQRVSTTTGQNNNSNFAWTAGTKYHLNGRNSLANPGIAMATHKDDKERFFPSNGILIFGKQNAARDNADYSDVMLTSEEEIKTTNPVATEEYGIVADNLQQQNTAPQIGTVNSQGALPGMVWQNRDVYLQGPIWAKIPHTDGNFHPSPLMGGFGLKHPPPQILIKNTPVPADPPTTFNQSKLNSFITQYSTGQVSVEIEWELQKENSKRWNPEIQYTSNYYKSTSVDFAVNTEGVYSEPHPIGTRYLTRPL

SEQ ID NO: 1190 - protein, 736 aa, Artificial Sequence
  Synthetic polypeptide
MAADGYLPDWLEDNLSEGIREWWALKPGAPKPKANQQKQDDGRGLVLPGYKYLGPFNGLDKGEPVNAADAAALEHDKAYDQQLKAGDNPYLRYNHADAEFQERLQEDTSFGGNLGRAVFQAKKRVLEPLGLVEEGAKTAPGKKRPVEQSPQEPDSSAGIGKTGAQPAKKRLNFGQTGDSESVPDPQPLGEPPATPAAVGPTTMASGGGAPMADNNEGADGVGSASGNWHCDSTWLGDRVITTSTRTWALPTYNNHLYKQISSASTGASNDNHYFGYSTPWGYFDFNRFHCHFSPRDWQRLINNNWGFRPKRLNFKLFNIQVKEVTDNNGVKTIANNLTSTIQVFTDSEYQLPYVLGSAHQGCLPPFPADVFMIPQYGYLTLNNGSQAVGRSSFYCLEYFPSQMLRTGNNFTFSYTFEDVPFHSSYAHSQSLDRLMNPLIDQYLYYLSRTQTTGGTANTQTLGFSQGGPNTMANQAKNWLPGPCYRQQRVSTTTGQNNNSNFAWTAGTKYHLNGRNSLANPGIAMATHKDDKERFFPSNGILIFGKQNAARDNADYSDVMLTSEEEIKTTNPVATEEYGIVADNLQQQNTAPQIGTVNSQGALPGMVWQNRDVYLQGPIWAKIPHTDGNFHPSPLMGGFGLKHPPPQILIKNTPVPADPPTTFNQSKLNSFITQYSTGQVSVEIEWELQKENSKRWNPEIQYTSNYYKSTSVDFAVNTEGVYSEPHPIGTRYLTRPL

SEQ ID NO: 1191 - protein, 736 aa, Artificial Sequence
  Synthetic polypeptide
MAADGYLPDWLEDNLSEGIREWWDLKPGAPKPKANQQKQDDGRGLVLPGYKYLGPFNGLDKGEPVNAADAAALEHDKAYDQQLKAGDNPYLRYNHADAEFQERLQEDTSFGGNLGRAVFQAKKRLLEPLGLVEEAAKTAPGKKRPVEQSPQEPDSSAGIGKSGAQPAKKRLNFGQTGDTESVPDPQPIGEPPAAPSGVGPNTMAAGGGAPMADNNEGADGVGSSSGNWHCDSQWLGDRVITTSTRTWALPTYNNHLYKQISSASTGASNDNHYFGYSTPWGYFDFNRFHCHFSPRDWQRLINNNWGFRPKRLNFKLFNIQVKEVTQNEGTKTIANNLTSTIQVFTDSEYQLPYVLGSAHQGCLPPFPADVFMIPQYGYLTLNNGSQAVGRSSFYCLEYFPSQMLRTGNNFQFTYTFEDVPFHSSYAHSQSLDRLMNPLIDQYLYYLSRTQTTGGTANTQTLGFSQGGPNTMANHAKNWLPGPCYRQQRVSTTTGQNNNSNFAWTAGTKYHLNGRNSLANPGIAMATHKDDKERFFPSNGILIFGKQNAARDNADYSDVMLTSEEEIKTTNPVATEEYGIVADNLQQQNTAPQIGTVNSQGALPGMVWQNRDVYLQGPIWAKIPHTDGNFHPSPLMGGFGLKHPPPQILIKNTPVPADPPTTFNQSKLNSFITQYSTGQVSVEIEWELQKENSKRWNPEIQYTSNYYKSTSVDFAVNTEGVYSEPHPIGTRYLTRPL

SEQ ID NO: 1192 - protein, 737 aa, Artificial Sequence; identical to SEQ ID NO: 1174
  Synthetic polypeptide

SEQ ID NO: 1193 - protein, 737 aa, Artificial Sequence
  Synthetic polypeptide
MAADGYLPDWLEDNLSEGIREWWALKPGAPKPKANQQKQDDGRGLVLPGYKYLGPFNGLDKGEPVNAADAAALEHDKAYDQQLKAGDNPYLRYNHADAEFQERLKEDTSFGGNLGRAVFQAKKRVLEPFGLVEEGAKTAPGKKRPVEQSPQEPDSSSGIGKTGQQPAKKRLNFGQTGDSESVPDPQPLGEPPAAPSGVGPNTMAAGGGAPMADNNEGADGVGSSSGNWHCDSQWLGNRVITTSTRTWALPTYNNHLYKQISNSTSGGSSNDNAYFGYSTPWGYFDFNRFHCHFSPRDWQRLINNNWGFRPKRLNFKLFNIQVKEVTDNNGVKTIANNLTSTVQVFTDSEYQLPYVLGSAHQGCLPPFPADVFMIPQYGYLTLNNGSQAVGRSSFYCLEYFPSQMLRTGNNFQFTYTFEDVPFHSSYAHSQSLDRLMNPLIDQYLYYLSRTQTTGGTANTQTLGFSQGGPNTMANQAKNWLPGPCYRQQRVSTTTGQNNNSNFAWTAGTKYHLNGRNSLANPGIAMATHKDDKERFFPSNGILIFGKQNAARDNADYSDVMLTSEEEIKTTNPVATEEYGIVADNLQQQNTAPQIGTVNSQGALPGMVWQNRDVYLQGPIWAKIPHTDGNFHPSPLMGGFGLKHPPPQILIKNTPVPADPPTTFNQSKLNSFITQYSTGQVSVEIEWELQKENSKRWNPEIQYTSNYYKSTSVDFAVNTEGVYSEPHPIGTRYLTRPL

SEQ ID NO: 1194 - protein, 736 aa, Artificial Sequence
  Synthetic polypeptide
MAADGYLPDWLEDNLSEGIREWWDLKPGAPKPKANQQKQDDGRGLVLPGYKYLGPFNGLDRGEPVNAADAAALEHDKAYDQQLKAGDNPYLRYNHADAEFQERLQEDTSFGGNLGRAVFQAKKRVLEPLGLVEEGAKTAPGKKRPVEQSPQEPDSSSGIGKTGQQPAKKRLNFGQTGDSESVPDPQPLGEPPATPAAVGPTTMASGGGAPMADNNEGADGVGNASGNWHCDSTWLGDRVITTSTRTWALPTYNNHLYKQISSASTGASNDNHYFGYSTPWGYFDFNRFHCHFSPRDWQRLINNNWGFRPKRLNFKLFNIQVKEVTDNNGVKTIANNLTSTIQVFTDSEYQLPYVLGSAHQGCLPPFPADVFMIPQYGYLTLNNGSQAVGRSSFYCLEYFPSQMLRTGNNFQFTYTFEDVPFHSSYAHSQSLDRLMNPLIDQYLYYLSRTQTTGGTANTQTLGFSQGGPNTMANQAKNWLPGPCYRQQRVSTTTGQNNNSNFAWTAGTKYHLNGRNSLANPGIAMATHKDDKERFFPSNGILIFGKQNAARDNADYSDVMLTSEEEIKTTNPVATEEYGIVADNLQQQNTAPQIGTVNSQGALPGMVWQNRDVYLQGPIWAKIPHTDGNFHPSPLMGGFGLKHPPPQILIKNTPVPADPPTTFNQSKLNSFITQYSTGQVSVEIEWELQKENSKRWNPEIQYTSNYYKSTSVDFAVNTEGVYSEPHPIGTRYLTRPL

SEQ ID NO: 1195 - protein, 736 aa, Artificial Sequence
  Synthetic polypeptide
MAADGYLPDWLEDNLSEGIREWWDLKPGAPKPKANQQKQDDGRGLVLPGYKYLGPFNGLDKGEPVNAADAAALEHDKAYDQQLKAGDNPYLRYNHADAEFQERLQEDTSFGGNLGRAVFQAKKRVLEPLGLVEEGAKTAPGKKRPVEQSPQEPDSSSGIGKKGQQPARKRLNFGQTGDSESVPDPQPLGEPPAAPSGVGSLTMASGGGAPMADNNEGADGVGNASGNWHCDSTWLGDRVITTSTRTWALPTYNNHLYKQISSASTGASNDNHYFGYSTPWGYFDFNRFHCHFSPRDWQRLINNNWGFRPKRLNFKLFNIQVKEVTQNEGTKTIANNLTSTVQVFTDSDYQLPYVLGSAHQGCLPPFPADVFMIPQYGYLTLNNGSQAVGRSSFYCLEYFPSQMLRTGNNFQFTYTFEDVPFHSSYAHSQSLDRLMNPLIDQYLYYLSRTQTTGGTANTQTLGFSQGGPNTMANQAKNWLPGPCYRQQRVSTTTGQNNNSNFAWTAGTKYHLNGRNSLSNPGIAMATHKDDKERFFPSNGILIFGKQNAARDNADYSDVMLTSEEEIKTTNPVATEEYGIVADNLQQQNTAPQIGTVNSQGALPGMVWQNRDMYLQGPIWAKIPHTDGNFHPSPLMGGFGLKHPPPQILIKNTPVPADPPTTFNQSKLNSFITQYSTGQVSVEIEWELQKENSKRWNPEIQYTSNYYKSTSVDFAVNTEGVYSEPHPIGTRYLTRPL

SEQ ID NO: 1196 - protein, 736 aa, Artificial Sequence
  Synthetic polypeptide
MAADGYLPDWLEDNLSEGIREWWALKPGAPKPKANQQKQDDGRGLVLPGYKYLGPFNGLDKGEPVNAADAAALEHDKAYDQQLKAGDNPYLRYNHADAEFQERLQEDTSFGGNLGRAVFQAKKRVLEPFGLVEEGAKTAPGKKRPVEQSPQEPDSSSGIGKTGQQPAKKRLNFGQTGGSESVPDPQPLGEPPATPAAVGPTTMAAGGGAPMADNNEGADGVGSSSGNWHCDSTWLGDRVITTSTRTWALPTYNNHLYKQISSASTGASNDNHYFGYSTPWGYFDFNRFHCHFSPRDWQRLINNNWGFRPKRLNFKLFNIQVKEVTDNNGVKTIANNLTSTVQVFTDSEYQLPYVLGSAHQGCLPPFPADVFMIPQYGYLTLNNGSQAVGRSSFYCLEYFPSQMLRTGNNFTFSYTFEEVPFHSSYAHSQSLDRLMNPLIDQYLYYLSRTQTTGGTANTQTLGFSQGGPNTMANQAKNWLPGPCYRQQRVSTTTGQNNNSNFAWTAGTKYHLNGRNSLANPGIAMASHKDDKERFFPSNGILIFGKQNAARDNADYSDVMLTSEEEIKTTNPVATEEYGIVADNLQQQNTAPQIGTVNSQGALPGMVWQNRDVYLQGPIWAKIPHTDGNFHPSPLMGGFGLKHPPPQILIKNTPVPADPPTTFNQSKLNSFITQYSTGQVSVEIEWELQKENSKRWNPEIQYTSNYYKSTSVDFAVNTEGVYSEPHPIGTRYLTRPL

SEQ ID NO: 1197 - DNA, 2211 bp, Artificial Sequence
  Synthetic polynucleotide
atggctgccgatggttatcttccagattggctcgaggacaacctctctgagggcattcgcgagtggtgggacttgaaacctgcatccccgaaacccaaagccaaccagcaaaagcaggacgacggccggggtctggtgcttcctggctacaagtacctcggacccttcaacggactcgacaagggggagcccgtcaacgcggcggacgcagcggccctcgagcacgacaaggcctacgaccagcagctcaaagcgggtgacaatccgtacctgcggtataaccacgccgacgccgagtttcaggagcgtctgcaagaagatacgtcttttgggggcaacctcgggcgagcagtcttccaggccaaaaagaggcttcttgaacctcttggtctggttgaggaagcggctaagacggctcctggaaagaagaggcctgtagagcagtctcctcaggaaccggactcctccgcgggtattggcaaatcgggtgcacagcccgccaaaaagagactcaatttcggtcagactggcggcacagagtcagttccagaccctcaacctctcggagaacctccagcagcgccctctggtgtgggacctaatacaatggctgcaggcggtggcgcaccaatggcagacaataacgaaggcgccgacggagtgggtagttcctcgggaaattggcattgcgattccacatggctgggcgacagagtcatcaccaccagcaccagaacctgggccctgcccacttacaacaaccatctctacaagcaaatctccagtgcttcaacgggggccagcaacgacaaccactacttcggctacagcaccccctgggggtattttgatttcaacagattccactgccacttctcaccacgtgactggcagcgactcatcaacaacaactggggattccggcccaagagactcagcttcaagctcttcaacatccaggtcaaggaggtcacgcagaatgaaggcaccaagaccatcgccaataacctcaccagcaccatccaggtgtttacggactcggagtaccagctgccgtacgttctcggctctgcccaccagggctgcctgcctccgttcccggcggacgtgttcatgattccccagtacggatacctaacactcaacaacggtagtcaggccgtgggacgctcctccttctactgcctggaatactttccttcgcagatgctgagaaccggcaacaacttccagtttacttacaccttcgaggacgtgcctttccacagcagctacgcccacagccagagcttggaccggctgatgaatcctctgattgaccagtacctgtactacttgtctcggactcaaacaacaggaggcacggcaaatacgcagactctgggcttcagccaaggtgggcctaatacaatggccaatcaggcaaagaactggctgccaggaccctgttaccgccaacaacgcgtctcaacgacaaccgggcaaaacaacaatagcaactttgcctggactgctgggaccaaataccatctgaatggaagaaattcattggctaatcctggcatcgctatggcaacacacaaagacgacaaggagcgtttttttcccagtaacgggatcctgatttttggcaaacaaaatgctgccagagacaatgcggattacagcgatgtcatgctcaccagcgaggaagaaatcaaaaccactaaccctgtggctacagaggaatacggtatcgtggcagataacttgcagcagcaaaacacggctcctcaaattggaactgtcaacagccagggggccttacccggtatggtctggcagaaccgggacgtgtacctgcagggtcccatctgggccaagattcctcacacggacggcaacttccacccgtctccgctgatgggcggctttggcctgaaacatcctccgcctcagatcctgatcaagaacacgcctgtacctgcggatcctccgaccaccttcaaccagtcaaagctgaactctttcatcacgcaatacagcaccggacaggtcagcgtggaaattgaatgggagctgcagaaggaaaacagcaagcgctggaaccccgagatccagtacacctccaactactacaaatctacaagtgtggactttgctgttaatacagaaggcgtgtactctgaaccccaccccattggcacccgttacctcacccgtcccctgtaa

SEQ ID NO: 1198 - DNA, 2211 bp, Artificial Sequence
  Synthetic polynucleotide
atggctgccgatggttatcttccagattggctcgaggacaacctctctgagggcattcgcgagtggtgggacttgaaacctggagccccgaaacccaaagccaaccagcaaaagcaggacgacggccggggtctggtgcttcctggctacaagtacctcggacccttcaacggactcgacaagggggagcccgtcaacgcggcggacgcagcggccctcgagcacgacaaggcctacgaccagcagctcaaagcgggtgacaatccgtacctgcggtataaccacgccgacgccgagtttcaggagcgtctgcaagaagatacgtcttttgggggcaacctcgggcgagcagtcttccaggccaagaagagggttctcgaaccttttggtctggttgaggaaggcgctaagacggctcctggaaagaaacgtccggtagagcagtcgccacaagagccagactcctcctcgggcattggcaagacaggccagcagcccgctaaaaagagactcaattttggtcagactggcgactcagagtcagtccccgacccacaacctctcggagaacctccagcaacccccgctgctgtgggacctactacaatggcttcaggtggtggcgcaccaatggcagacaataacgaaggcgccgacggagtgggtaatgcctcaggaaattggcattgcgattcccaatggctgggggacagagtcatcaccaccagcacccgaacctgggccctgcccacctacaacaatcacctctacaagcaaatctccagtgcttcaacgggggccagcaacgacaaccactacttcggctacagcaccccctgggggtattttgatttcaacagattccactgccatttctcaccacgtgactggcagcgactcatcaacaacaattggggattccggcccaagagactcaacttcaaactcttcaacatccaagtcaaggaggtcacgcagaatgaaggcaccaagaccatcgccaataacctcaccagcaccatccaggtgtttacggactcggagtaccagctgccgtacgttctcggctccgcccaccagggctgcctgcctccgttcccggcggacgtgttcatgattccccagtacggctacctaacactcaacaacggtagtcaggccgtgggacgctcctccttctactgcctggaatactttccttcgcagatgctgagaaccggcaacaacttccagtttacttacaccttcgaggacgtgcctttccacagcagctacgcccacagccagagcttggaccggctgatgaatcctctgattgaccagtacctgtactacttgtctcggactcaaacaacaggaggcacggcaaatacgcagactctgggcttcagccaaggtgggcctaatacaatggccaatcaggcaaagaactggctgccaggaccctgttaccgccaacaacgcgtctcaacgacaaccgggcaaaacaacaatagcaactttgcctggactgctgggaccaaataccatctgaatggaagaaattcattggctaatcctggcatcgctatggcaacacacaaagacgacaaggagcgtttttttcccagtaacgggatcctgatttttggcaaacaaaatgctgccagagacaatgcggattacagcgatgtcatgctcaccagcgaggaagaaatcaaaaccactaaccctgtggctacagaggaatacggtatcgtggcagataacttgcagcagcaaaacacggctcctcaaattggaactgtcaacagccagggggccttacccggtatggtctggcagaaccgggacgtgtacctgcagggtcccatctgggccaagattcctcacacggacggcaacttccacccgtctccgctgatgggcggctttggcctgaaacatcctccgcctcagatcctgatcaagaacacgcctgtacctgcggatcctccgaccaccttcaaccagtcaaagctgaactctttcatcacgcaatacagcaccggacaggtcagcgtggaaattgaatgggagctgcagaaggaaaacagcaagcgctggaaccccgagatccagtacacctccaactactacaaatctacaagtgtggactttgctgttaatacagaaggcgtgtactctgaaccccaccccattggcacccgttacctcacccgtcccctgtaa

SEQ ID NO: 1199 - DNA, 2211 bp, Artificial Sequence
  Synthetic polynucleotide
atggctgccgatggttatcttccagattggctcgaggacaacctctctgagggcattcgcgagtggtgggacttggaacctggagccccgaagcccaaagccaaccagcaaaagcaggacgacggccggggtctggtgcttcctggctacaagtacctcggacccttcaacggactcgacaagggggagcccgtcaacgcggcggacgcagcggccctcgagcacgacaaggcctacgaccagcagctcaaagcgggtgacaatccgtacctgcggtataaccacgccgacgccgagtttcaggagcgtctgcaagaagatacgtcttttgggggcaacctcgggcgagcagtcttccaggccaagaagcgggttctcgaacctctcggtctggttgaggaaggcgctaagacggctcctggaaagaaacgtccggtagagcagtcgccacaagagccagactcctcctcgggcatcggcaagacaggccagcagcccgctaaaaagagactcaattttggtcagactggcgactcagagtcagtccccgatccacaacctctcggagaacctccagcaacccccgctgctgtgggacctactacaatggcttcaggcggtggcgcaccaatggcagacaataacgaaggcgccgacggagtgggtaatgcctcaggaaattggcattgcgattccacatggctgggcgacagagtcatcaccaccagcacccgcacctgggccttgcccacctacaataaccacctctacaagcaaatctccagtgcttcaacaggggccagcaacgacaaccactacttcggctacagcaccccctgggggtattttgacttcaacagattccactgccacttctcaccacgtgactggcagcgactcatcaacaacaactggggattccggcctaagcgactcaacttcaagctcttcaacattcaggtcaaagaggttacggacaacaatggagtcaagaccatcgccaataaccttaccagcacggtccaggtcttcacggactcggagtaccagttgccgtacgtcctcggctctgcgcaccagggctgcctccctccgttcccggcggacgtgttcatgattccgcagtacggctacctaacgctcaacaacggtagtcaggccgtgggacgctcctccttctactgcctggaatactttccttcgcagatgctgagaaccggcaacaacttccagtttacttacaccttcgaggacgtgcctttccacagcagctacgcccacagccagagcttggaccggctgatgaatcctctgattgaccagtacctgtactacttgtctcggactcaaacaacaggaggcacggcaaatacgcagactctgggcttcagccaaggtgggcctaatacaatggccaatcaggcaaagaactggctgccaggaccctgttaccgccaacaacgcgtctcaacgacaaccgggcaaaacaacaatagcaactttgcctggactgctgggaccaaataccatctgaatggaagaaattcattggctaatcctggcatcgctatggcaacacacaaagacgacaaggagcgtttttttcccagtaacgggatcctgatttttggcaaacaaaatgctgccagagacaatgcggattacagcgatgtcatgctcaccagcgaggaagaaatcaaaaccactaaccctgtggctacagaggaatacggtatcgtggcagataacttgcagcagcaaaacacggctcctcaaattggaactgtcaacagccagggggccttacccggtatggtctggcagaaccgggacgtgtacctgcagggtcccatctgggccaagattcctcacacggacggcaacttccacccgtctccgctgatgggcggctttggcctgaaacatcctccgcctcagatcctgatcaagaacacgcctgtacctgcggatcctccgaccaccttcaaccagtcaaagctgaactctttcatcacgcaatacagcaccggacaggtcagcgtggaaattgaatgggagctgcagaaggaaaacagcaagcgctggaaccccgagatccagtacacctccaactactacaaatctacaagtgtggactttgctgttaatacagaaggcgtgtactctgaaccccaccccattggcacccgttacctcacccgtcccctgtaa

SEQ ID NO: 1200 - DNA, 2211 bp, Artificial Sequence
  Synthetic polynucleotide
atggctgccgatggttatcttccagattggctcgaggacactctctctgaaggaataagacagtggtggaagctcaaacctggcccaccaccaccaaagcccgcagagcggcataaggacgacagcaggggtcttgtgcttcctgggtacaagtacctcggacccttcaacggactcgacaagggagagccggtcaacgaggcagacgccgcggccctcgagcacgacaaagcctacgaccggcagctcgacagcggagacaacccgtacctcaagtacaaccacgccgacgcggagtttcaggagcgccttaaagaagatacgtcttttgggggcaacctcgggcgagcagtcttccaggccaagaagagggttctcgaaccttttggtctggttgaggaaggtgctaagacggctcctggaaagaaacgtccggtagagcagtcgccacaagagccagactcctcctcgggcattggcaagacaggccagcagcccgctaaaaagagactcaattttggtcagactggcgactcagagtcagtccccgacccacaacctctcggagaacctccagcaacccccgctgctgtgggacctactacaatggcttcaggcggtggcgcaccaatggcagacaataacgaaggcgccgacggagtgggtaatgcctcaggaaattggcattgcgattccacatggctgggcgacagagtcatcaccaccagcacccgaacatgggccttgcccacctataacaaccacctctacaagcaaatctccagtgcttcaacgggggccagcaacgacaaccactacttcggctacagcaccccctgggggtattttgacttcaacagattccactgccacttctcaccacgtgactggcagcgactcatcaacaacaactggggattccggcctaagcgactcaacttcaagctcttcaacattcaggtcaaagaggttacggacaacaatggagtcaagaccatcgccaataaccttaccagcacggtccaggtcttcacggactcagactatcagctcccgtacgtgctcgggtcggctcacgagggctgcctcccgccgttcccagcggacgttttcatgattcctcagtacggctacctaacactcaacaacggtagtcaggccgtgggacgctcctccttctactgcctggaatactttccttcgcagatgctgagaaccggcaacaacttccagtttacttacaccttcgaggacgtgcctttccacagcagctacgcgcacagccagagtctggaccggctgatgaatcctctgattgaccagtacctgtactacttgtctcggactcaaacaacaggaggcacggcaaatacgcagactctgggcttcagccaaggtgggcctaatacaatggccaatcaggcaaagaactggctgccaggaccctgttaccgccaacaacgcgtctcaacgacaaccgggcaaaacaacaatagcaactttgcctggactgctgggaccaaataccatctgaatggaagaaattcattggctaatcctggcatcgctatggcaacacacaaagacgacaaggagcgtttttttcccagtaacgggatcctgattttcggcaaacaaaatgctgccagagacaatgcggattacagcgatgtcatgctcaccagcgaggaagaaatcaaaaccactaaccctgtggctacagaggaatacggtatcgtggcagataacttgcagcagcaaaacacggctcctcaaattggaactgtcaacagccagggggccttacccggtatggtctggcagaaccgggacgtgtacctgcagggtcccatctgggccaagattcctcacacggacggcaacttccacccgtctccgctgatgggcggctttggcctgaaacatcctccgcctcagatcctgatcaagaacacgcctgtacctgcggatcctccgaccaccttcaaccagtcaaagctgaactctttcatcacgcaatacagcaccggacaggtcagcgtggaaattgaatgggagctgcagaaggaaaacagcaagcgctggaaccccgagatccagtacacctccaactactacaaatctacaagtgtggactttgctgttaatacagaaggcgtgtactctgaaccccaccccattggcaccagatacctgactcgtaatctgtaa

SEQ ID NO: 1201 - DNA, 2208 bp, Artificial Sequence
  Synthetic polynucleotide
atggctgccgatggttatcttccagattggctcgaggacactctctctgaaggaataagacagtggtggaagctcaaacctggcccaccaccaccaaagcccgcagagcggcataaggacgacagcaggggtcttgtgcttcctgggtacaagtacctcggacccttcaacggactcgacaagggagagccggtcaacgaggcagacgccgcggccctcgagcacgacaaagcctacgaccggcagctcgacagcggagacaacccgtacctcaagtacaaccacgccgacgcggagtttcaggagcgccttaaagaagatacgtcttttgggggcaacctcggacgagcagtcttccaggcgaaaaagagggttcttgaacctctgggcctggttgaggaacctgttaagacggctccgggaaaaaagaggccggtagagcagtcgccacaagagccagactcctcctcgggcatcggcaagaaaggccagcagcccgctaaaaagagactcaattttggtcagactggcgactcagagtcagtccccgacccacaacctctcggagaacctccagcaacccccgctgctgtgggacctactacaatggcttcaggcggtggcgcaccaatggcggacaataacgaaggcgccgatggagtgggtaatgcctcaggaaattggcattgcgattccacatggctgggcgacagagtcatcaccaccagcacccgaacatgggccttgcccacctataacaaccacctctacaagcaaatctccagtgcttcaacgggggccagcaacgacaaccactacttcggctacagcaccccctgggggtattttgacttcaacagattccactgccacttctcaccacgtgactggcagcgactcatcaacaacaactggggattccggcctaagcgactcaacttcaagctcttcaacattcaggtcaaagaggttacggacaacaatggagtcaagaccatcgccaataaccttaccagcacggtccaggtcttcacggactcagactatcagctcccgtacgttctcggctctgcccaccagggctgcctgcctccgttcccggcggacgtgttcatgattccccagtacggctacctaacactcaacaacggtagtcaggccgtgggacgctcctccttctactgcctggaatactttccttcgcagatgctgagaaccggcaacaacttccagtttacttacaccttcgaggacgtgcctttccacagcagctacgcccacagccagagcttggaccggctgatgaatcctctgattgaccagtacctgtactacttgtctcggactcaaacaacaggaggcacggcaaatacgcagactctgggcttcagccaaggtgggcctaatacaatggccaatcaggcaaagaactggctgccaggaccctgttaccgccaacaacgcgtctcaacgacaaccgggcaaaacaacaatagcaactttgcctggactgctgggaccaaataccatctgaatggaagaaattcattggctaatcctggcatcgctatggcaacacacaaagacgacaaggagcgtttttttcccagtaacgggatcctgatttttggcaaacaaaatgctgccagagacaatgcggattacagcgatgtcatgctcaccagcgaggaagaaatcaaaaccactaaccctgtggctacagaggaatacggtatcgtggcagataacttgcagcagcaaaacacggctcctcaaattggaactgtcaacagccagggggccttacccggtatggtctggcagaaccgggacgtgtacctgcagggtcccatctgggccaagattcctcacacggacggcaacttccacccgtctccgctgatgggcggctttggcctgaaacatcctccgcctcagatcctgatcaagaacacgcctgtacctgcggatcctccgaccaccttcaaccagtcaaagctgaactctttcatcacgcaatacagcaccggacaggtcagcgtggaaattgaatgggagctgcagaaggaaaacagcaagcgctggaaccccgagatccagtacacctccaactactacaaatctacaagtgtggactttgctgttaatacagaaggcgtgtactctgaaccccaccccattggcacccgttacctcacccgtcccctg

SEQ ID NO: 1202 - DNA, 2211 bp, Artificial Sequence
  Synthetic polynucleotide
atggctgccgatggttatcttccagattggctcgaggacactctctctgaaggaataagacagtggtggaagctcaaacctggcccaccaccaccaaagcccgcagagcggcataaggacgacagcaggggtcttgtgcttcctgggtacaagtacctcggacccttcaacggactcgacaagggagagccggtcaacgaggcagacgccgcggccctcgagcacgacaaagcctacgaccagcagctccaagcgggtgacaatccgtacctgcggtataaccacgccgacgccgagtttcaggagcgtcttcaaggagatacgtcttttgggggcaacctcggacgagcagtcttccaggccaaaaagaggcttcttgaacctcttggtctggttgaggaagcggctaagacggctcctggaaagaagaggcctgtagagcagtctcctcaggaaccggactcctccgcgggtattggcaaatcgggtgcacagcccgctaaaaagagactcaatttcggtcagactggcgacacagagtcagtcccagaccctcaaccaatcggagaacctcccgcagccccctcaggtgtgggatctcttacaatggcttcaggtggtggcgcaccagtggcagacaataacgaaggtgccgatggagtgggtagttcctcgggaaattggcattgcgattcccaatggctgggggacagagtcatcaccaccagcacccgaacatgggccttgcccacctataacaaccacctctacaagcaaatctccagtgcttcaacgggggccagcaacgacaaccactacttcggctacagcaccccctgggggtattttgacttcaaccgcttccactgccacttctcaccacgtgactggcagcgactcatcaacaacaactggggattccggcccaagagactcagcttcaagctcttcaaccatccaggtcaaggaggtcacgcagaatgaaggcaccaagaccatcgccaataacctcaccagcacatccaggtgtttacggactcggagtaccagctgccgtacgttctcggctctgcccaccagggctgcctgcctccgttcccggcggacgtgttcatgattccccagtacggctacctaacactcaacaacggtagtcaggccgtgggacgctcctccttctactgcctggaatactttccttcgcagatgctgagaaccggcaacaacttccagttcacttacaccttcgaggacgtgcctttccacagcagctacgcgcacagccagagcttggaccggctgatgaatcctctgattgaccagtacctgtactacttgtctcggactcaaacaacaggaggcacggcaaatacgcagactctgggcttcagccaaggtgggcctaatacaatggccaatcaggcaaagaactggctgccaggaccctgttaccgccaacaacgcgtctcaacgacaaccgggcaaaacaacaatagcaactttgcctggactgctgggaccaaataccatctgaatggaagaaattcattgggtaatcctggcatcgctatggcaacacacaaagacgacaaggagcgtttttttcccagtaacgggatcctgatttttggcaaacaaaatgctgccagagacaatgcggattacagcgatgtcatgctcaccagcgaggaagaaatcaaaaccactaaccctgtggctacagaggaatacggtatcgtggcagataacttgcagcagcaaaacacggctcctcaaattggaactgtcaacagccagggggccttacccggtatggtctggcagaaccgggacgtgtacctgcagggtcccatctgggccaagattcctcacacggacggcaacttccacccgtctccgctgatgggcggctttggcctgaaacatcctccgcctcagatcctcatcaaaaacacacctgtacctgcggatcctccaacggccttcaaccagtcaaagctgaactctttcatcacgcaatacagcaccggacaggtcagcgtggaaattgaatgggagctgcagaaggaaaacagcaagcgctggaaccccgagatccagtacacctccaactactacaaatctacaagtgtggactttgctgttaatacagaaggcgtgtactctgaaccccaccccattggcacccgttacctcacccgtcccctgtaa

SEQ ID NO: 1203 - DNA, 2214 bp, Artificial Sequence
  Synthetic polynucleotide
atggctgccgatggttatcttccagattggctcgaggacaacctctctgagggcattcgcgagtggtgggacttgaaacatggagccccgaaacccaaagccaaccagcaaaagcaggacgacggccggggtctggtgcttcctggctacaagtacctcggacccttcaacggactcgacaagggggagcccgtcaacgcggcggatgcagcggccctcgagcacgacaaggcctacgaccagcagctcaaagcgggtgacaatccgtacctgcggtataaccacgccgacgccgagtttcaggagcgtctgcaagaagatacgtcttttgggggcaacctcgggcgagcagtcttccaggccaagaagagggttctcgaaccttttggtctggttgaggaaggtgctaagacggctcctggaaagaaacgtccggtagagcagtcgccacaagagccagactcctcctcgggcattggcaagacaggccagcagcccgctaaaaagagactcaattttggtcagactggcgactcagagtcagtccccgacccacaacctctcggagaacctccagcaacccccgctgctgtgggacctactacaatggcttcaggcggtggcgcaccaatggcagacaataacgaaggcgccgacggagtgggtaatgcctcaggaaattggcattgcgattccacatggctgggcgacagagtcatcaccaccagcacccgaacatgggccttgcccacctataacaaccacctctacaagcaaatctccaacgggacttcgggaggaagcaccaacgacaacacctacttcggctacagcaccccctgggggtattttgactttaacagattccactgccacttctcaccacgtgactggcagcgactcatcaacaacaactggggattccggcccaagagactcaacttcaaactcttcaacatccaagtcaaggaggtcacgcagaatgaaggcaccaagaccatcgccaataacctcaccagcaccatccaggtgtttacggactcggagtaccagctgccgtacgttctcggctccgcccaccagggctgcctgcctccgttcccggcggacgtgttcatgattccccagtacggctacctaacactcaacaacggtagtcaggccgtgggacgctcctccttctactgcctggaatactttccttcgcagatgctgagaacgggcaacaactttaccttcagctacacctttgaggacgttcctttccacagcagctacgctcacagccagagtctggaccgtctcatgaatcctctgattgaccagtacctgtactacttgtctcggactcaaacaacaggaggcacggcaaatacgcagactctgggcttcagccaaggtgggcctaatacaatggccaatcaggcaaagaactggctgccaggaccctgttaccgccaacaacgcgtctcaacgacaaccgggcaaaacaacaatagcaactttgcctggactgctgggaccaaataccatctgaatggaagaaattcattggctaatcctggcatcgctatggcaacacacaaagacgacaaggagcgtttttttcccagtaacgggatcctgatttttggcaaacaaaatgctgccagagacaatgcggattacagcgatgtcatgctcaccagcgaggaagaaatcaaaaccactaaccctgtggctacagaggaatacggtatcgtggcagataacttgcagcagcaaaacacggctcctcaaattggaactgtcaacagccagggggccttacccggtatggtctggcagaaccgggacgtgtacctgcagggtcccatctgggccaagattcctcacacggacggcaacttccacccgtctccgctgatgggcggctttggcctgaaacatcctccgcctcagatcctgatcaagaacacgcctgtacctgcggatcctccgaccaccttcaaccagtcaaagctgaactctttcatcacgcaatacagcaccggacaggtcagcgtggaaattgaatgggagctgcagaaggaaaacagcaagcgctggaaccccgagatccagtacacctccaactactacaaatctacaagtgtggactttgctgttaatacagaaggcgtgtactctgatccccaccccattggcacccgttacctcacccgtcccctgtaa

SEQ ID NO: 1204 - DNA, 2214 bp, Artificial Sequence
  Synthetic polynucleotide
atggctgccgatggttatcttccagattggctcgaggacaacctctctgagggcattcgcgagtggtgggcgctgaaacctggagccccgaagcccaaagccaaccagcaaaagcaggacgacggccggggtctggtgcttcctggctacaagtacctcggacccttcaacggactcgacaaaggagagccggtcaacgaggcggacgcggcagccctcgaacacgacaaggcctacgaccagcagctcaaagcgggtgacaatccgtacctgcggtataaccacgccgacgccgagtttcaggagcgtctgcaagaagatacgtcttttgggggcaacctcgggcgagcagtcttccaggccaagaagcgggttctcgaacctctcggtctggttgaggaaggcgctaagacggctcctggaaagaagagaccggtagagccatcaccccagcgttctccagactcctctacgggcatcggcaagaaaggccagcagcccgccagaaaaagactcaattttggtcagactggcgactcagagtcagttccagaccctcaacctctcggagaacctccagcagcgccctctggtgtgggacctaatacaatggcttcaggcggtggcgcaccaatggcagacaataacgagggcgccgacggagtgggtaattcctcgggaaattggcattgcgattccacatggatgggcgacagagtcatcaccaccagcacccgaacctgggccctgcccacctacaacaaccacctctacaagcaaatctccagtgcttcaacgggggccagcaacgacaaccactacttcggctacagcaccccctgggggtattttgactttaacagattccactgccacttttcaccacgtgactggcagcgactcatcaacaacaactggggattccggcccaagagactcaacttcaagctcttcaacatccaagtcaaggaggtcacgcagaatgaaggcaccaagaccatcgccaataacctcaccagcaccatccaggtgtttacggactcggagtaccagctgccgtacgttctcggctctgcccaccagggctgcctgcctccgttcccggcggacgtgttcatgattccccagtacggctacctaacactcaacaacggtagtcaggccgtgggacgctcctccttctactgcctggaatactttccttcgcagatgctgagaaccggcaacaacttccagtttacttacaccttcgaggacgtgcctttccacagcagctacgcgcacagccagagcttggaccggctgatgaatcctctgattgaccagtacctgtactacttgtctcggactcaaacaacaggaggcacggcaaatacgcagactctgggcttcagccaaggtgggcctaatacaatggccaatcaggcaaagaactggctgccaggaccctgttaccgccaacaacgcgtctcaacgacaaccgggcaaaacaacaatagcaactttgcctggactgctgggaccaaataccatctgaatggaagaaattcattggctaatcctggcatcgctatggcaacacacaaagacgacaaggagcgtttttttcccagtaacgggatcctgatttttggcaaacaaaatgctgccagagacaatgcggattacagcgatgtcatgctcaccagcgaggaagaaatcaaaaccactaaccctgtggctacagaggaatacggtatcgtggcagataacttgcagcagcaaaacacggctcctcaaattggaactgtcaacagccagggggccttacccggtatggtctggcagaaccgggacgtgtacctgcagggtcccatctgggccaagattcctcacacggacggcaacttccacccgtctccgctgatgggcggctttggcctgaaacatcctccgcctcagatcctgatcaagaacacgcctgtacctgcggatcctccgaccaccttcaaccagtcaaagctgaactctttcatcacacaatacagcaccggacaggtcagcgtggaaattgaatgggagctgcagaaggaaaacagcaagcgctggaaccccgagatccagtacacctccaactactacaaatctacaagtgtggactttgctgttaatacagaaggcgtgtactctgaaccccaccccattggcacccgttacctcacccgtcccctgtaa

SEQ ID NO: 1205 - DNA, 2211 bp, Artificial Sequence
  Synthetic polynucleotide
  modified_base (676)..(676): a, c, t, or g
  misc_feature (676)..(676): n is a, c, g, or t
atggctgccgatggttatcttccagattggctcgaggacactctctctgaaggaataagacagtggtggaagctcaaacctggcccaccaccaccaaagcccgcagagcggcataaggacgacagcaggggtcttgtgcttcctgggtacaagtacctcggacccttcaacggactcgacaagggagagccggtcaacgaggcagacgccgcggccctcgagcacgacaaagcctacgaccggcagctcgacagcggagacaacccgtacctcaagtacaaccacgccgacgcggagtttcaggagcgccttaaagaagatacgtcttttgggggcaacctcggacgagcagtcttccaggcgaaaaagagggttcttgaacctctgggcctggttgaggaacctgttaagacggctccgggaaaaaagaggccggtagagcagtcgccacaagagccagactcctcctcgggcatcggcaagaaaggccagcagcccgctaaaaagagactcaattttggtcagactggcgactcagagtcagtccccgacccacaacctctcggagaacctccagcaacccccgctgctgtgggacctactacaatggcttcaggcggtggcgcaccaatggcggacaataacgaaggcgccgatggagtgggtaatgcctcangaaattggcattgcgattccacatggctgggcgacagagtcatcaccaccagcacccgaacatgggccttgccacctataacaaccacctctacaagcaaatctccagtgcttcaacgggggcgcagcaacgacaaccactacttcggctacagcaccccctgggggtattttgacttcaacagattccactgccacttctcaccacgtgactggcagcgactcatcaacaacaactggggattccggcctaagcgactcaacttcaagctcttcaacattcaggtcaaagaggttacggacaacaatggagtcaagaccatcgccaataaccttaccagcacggtccaggtcttcacggactcagactatcagctcccgtacgttctcggctctgcccaccagggctgcctgcctccgttcccggcggacgtgttcatgattccccagtacggctacctaacactcaacaacggtagtcaggccgtgggacgctcctccttctactgcctggaatactttccttcgcagatgctgagaaccggcaacaacttccagtttacttacaccttcgaggacgtgcctttccacagcagctacgcccacagccagagcttggaccggctgatgaatcctctgattgaccagtacctgtactacttgtctcggactcaaacaacaggaggcacggcaaatacgcagactctgggcttcagccaaggtgggcctaatacaatggccaatcaggcaaagaactggctgccaggaccctgttaccgccaacaacgcgtctcaacgacaaccgggcaaaacaacaatagcaactttgcctggactgctgggaccaaataccatctgaatggaagaaattcattggctaatcctggcatcgctatggcaacacacaaagacgacaaggagcgtttttttcccagtaacgggatcctgatttttggcaaacaaaatgctgccagagacaatgcggattacagcgatgtcatgctcaccagcgaggaagaaatcaaaaccactaaccctgtggctacagaggaatacggtatcgtggcagataacttgcagcagcaaaacacggctcctcaaattggaactgtcaacagccagggggccttacccggtatggtttggcagaaccgggacgtgtacctgcagggtcccatctgggccaagattcctcacacggacggcaacttccacccgtctccgctgatgggcggctttggcctgaaacatcctccgcctcagatcctgatcaagaacacgcctgtacctgcggatcctccgaccaccttcaaccagtcaaagctgaactctttcatcacacagtactccacgggacaggtcagcgtggaaattgaatgggagctgcagaaggaaaacagcaagcgctggaacccggagatccagtacacttccaactactacaaatctacaaatgtggactttgctgttaacacagaaggcgtgtactctgaaccccaccccattggcacccgttacctcacccgtcccctgtaa

SEQ ID NO: 1206 - DNA, 2211 bp, Artificial Sequence
  Synthetic polynucleotide
  modified_base (715)..(715): a, c, t, or g
  misc_feature (715)..(715): n is a, c, g, or t
atggctgccgatggttatcttccagattggctcgaggacaacctctctgagggcattcgcgagtggtgggacttgaaacctggagccccgaaacccaaagccaaccagcaaaagcaggacgacggccggggtctggtgcttcctggctacaagtacctcggacccttcaacggactcgacaagggggagcccgtcaacgcggcggatgcagcggccctcgagcacgacaaggcctacgaccagcagctccaagcgggtgacaatccgtacctgcggtataaccacgccgacgccgagtttcaggagcgtcttcaaggagatacgtcttttgggggcaacctcggacgagcagtcttccaggccaagaagcgggttctcgaacctctcggtctggttgaggaagcggctaagacggctcctggaaagaagaggcctgtagagcagtctcctcaggaaccggactcctccgcgggtattggcaaatcgggtgcacagcccgctaaaaagagactcaatttcggtcagactggcgacacagagtcagtcccagaccctcaaccaatcggagaacctcccgcagccccctctggtgtgggacctaatacaatggctgcaggcggtggcgcaccaatggcagacaataacgaaggcgccgatggagtgggtagttcctcgggaaattggcattgcgattccacatggctgggcgacagantcatcaccaccagcacccgaacctgggccctgcccacctataacaaccatctctacaagcaaatctccagtgcttcaacgggggccagcaacgacaaccactacttcggctacagcaccccctgggggtattttgacttcaacagattccactgccacttctcaccacgtgactggcagcgactcatcaacaacaactggggattccggcctaagcgactcaacttcaagctcttcaacattcaggtcaaagaggttacggacaacaatggagtcaagaccatcgccaataaccttaccagcacggtccaggtcttcacggactcggagtaccagttgccgtacgtcctcggctctgcgcaccagggctgcctgcctccgttcccggcggacgtgttcatgattccgcagtacggctacctaacgctcaacaatggcagccaggcagtgggacggtcatccttttactgcctggaatatttcccatcgcagatgctgagaacgggcaacaactttaccttcagctacacttttgaggacgttcctttccacagcagctacgctcacagccagagtctggaccgtctcatgaatcctctgattgaccagtacctgtactacttgtctcggactcaaacaacaggaggcacggcaaatacgcagactctgggcttcagccaaggtgggcctaatacaatggccaatcaggcaaagaactggctgccaggaccctgttaccgccaacaacgcgtctcaacgacaaccggacaaaacaacaatagcaactttgcctggactgctgggaccaaataccatctgaatggaagaaattcattggctaatcctggcatcgctatggcaacacacaaagacgacaaggagcgtttttttcccagtaacgggatcctgatttttggcaaacaaaatgctgccagagacaatgcggattacagcgatgtcatgctcaccagcgaggaagaaatcaaaaccactaaccctgtggctacagaggaatacggtatcgtggcagataactttcagcagcaaaacacggctcctcaaattggaactgtcaacagccagggggccttacccggtatggtctggcagaaccgggacgtgtacctgcagggtcccatctgggccaagattcctcacacggacggcaacttccacccgtctccgctgatgggcggctttggcctgaaacatcctccgcctcagatcctgatcaagaacacgcctgtacctgcggatcctccgaccaccttcaaccagtcaaagctgaactctttcatcacgcaatacagcaccggacaggtcagcgtggaaattgaatgggagctgcagaaggaaaacagcaagcgctggaaccccgagatccagtacacctccaactactacaaatctacaagtgtggactttgctgttaatacagaaggcgtgtactctgaaccccaccccattggcacccgttacctcacccgtcccctgtaa

SEQ ID NO: 1207 - DNA, 2211 bp, Artificial Sequence
  Synthetic polynucleotide
atggctgccgatggttatcttccagattggctcgaggacaacctctctgagggcattcgcgagtggtgggcgctgaaacctggagccccgaagcccaaagccaaccagcaaaagcaggacgacggccggggtctggtgcttcctggctacaagtacctcggacccttcaacggactcgacaaaggagagccggtcaacgaggcggacgcggcagccctcgaacacgacaaagcttacgaccagcagctcaaggccggtgacaacccctacctcaagtataaccacgccgacgccgagtttcaggagcgtctgcaagaagatacgtcttttgggggcaacctcgggcgagcagtcttccaggccaaaaagaggcttcttgaacctcttggtctggttgaggaagcggctaagacggctcctggaaagaagaggcctgtagagcagtctcctcaggaaccggactcctccgcgggtattggcaaatcgggtgcacagcccgctaaaaagagactcaatttcggtcagactggcgacacagagtcagtcccagacccacaacctctcggagaacctccagcaacccccgctgctgtgggacctactacaatggcttcaggcggtggcgcaccaatggcggacaataacgaaggcgccgatggagtgggtaatgcctcaggaaattggcattgcgattccacatggctgggcgacagagtcatcaccaccagcacccgaacatgggccttgcccacctataacaaccacctctacaagcaaatctccagtgcttcaacgggggccagcaacgacaaccactacttcggctacagcaccccctgggggtattttgacttcaacagattccactgccacttctcaccacgtgactggcagcgactcatcaacaacaactggggattccggcccaagagactcagcttcaagctcttcaacatccaggtcaaggaggtcacgcagaatgaaggcaccaagaccatcgccaataacctcaccagcaccatccaggtgtttacggactcggagtaccagctgccgtacgttctcggctccgcccaccagggctgcctgcctccgttcccggcggacgtgttcatgattccccagtacggctacctaacactcaacaacggtagtcaggccgtgggacgctcctccttctactgcctggaatactttccttcgcagatgctgagaaccggcaacaacttccagtttacttacaccttcgaggacgtgcctttccacagcagctacgcccacagccagagcttggaccggctgatgaatcctctgattgaccagtacctgtactacttgtctcggactcaaacaacaggaggcacggcaaatacgcagactctgggcttcagccaaggtgggcctaatacaatggccaatcaggcaaagaactggctgccaggaccctgttaccgccaacaacgcgtctcaacgacaaccgggcaaaacaacaatagcaactttgcctggactgctgggaccaaataccatctgaatggaagaaattcattggctaatcctggcatcgctatggcaacacacaaagacgacaaggagcgtttttttcccagtaacgggatcctgatttttggcaaacaaaatgctgccagagacaatgcggattacagcgatgtcatgctcaccagcgaggaagaaatcaaaaccactaaccctgtggctacagaggaatacggtatcgtggcagataacttgcagcagcaaaacacggctcctcaaattggaactgtcaacagccagggggccttacccggtatggtctggcagaaccgggacgtgtacctgcagggtcccatctgggccaagattcctcacacggacggcaacttccacccgtctccgctgatgggcggctttggcctgaaacatcctccgcctcagatcctgatcaagaacacgcctgtacctgcggatcctccgaccaccttcaaccagtcaaagctgaactctttcatcacgcaatacagcaccggacaggtcagcgtggaaattgaatgggagctgcagaaggaaaacagcaagcgctggaaccccgagatccagtacacctccaactactacaaatctacaagtgtggactttgctgttaatacagaaggcgtgtactctgaaccccaccccattggcacccgttacctcacccgtcccctgtaa

SEQ ID NO: 1208 - DNA, 2211 bp, Artificial Sequence
  Synthetic polynucleotide
atggctgccgatggttatcttccagattggctcgaggacactctctctgaaggaataagacagtggtggaagctcaaacctggcccaccaccaccaaagcccgcagagcggcataaggacgacagcaggggtcttgtgcttcctgggtacaagtacctcggacccttcaacggactcgacaagggagagccggtcaacgaggcagacgccgcggccctcgagcacgacaaagcctacgaccagcagctccaagcgggtgacaatccgtacctgcggtataaccacgccgacgccgagtttcaggagcgtcttcaaggagatacgtcttttgggggcaacctcggacgagcagtcttccaggccaaaaagaggcttcttgaacctcttggtctggttgaggaagcggctaagacggctcctggaaagaagaggcctgtagagcagtctcctcaggaaccggactcctccgcgggtattggcaaatcgggtgcacagcccgctaaaaagagactcaatttcggtcagactggcgacacagagtcagtcccagaccctcaaccaatcggagaacctcccgcagccccctcaggtgtgggatctcttacaatggcttcaggtggtggcgcaccagtggcagacaataacgaaggtgccgatggagtgggtagttcctcgggaaattggcattgcgattcccaatggctgggggacagagtcatcaccaccagcacccgaacatgggccttgcccacctataacaaccacctctacaagcaaatctccagtgcttcaacgggggccagcaacgacaaccactacttcggctacagcaccccctgggggtattttgacttcaaccgcttccactgccacttctcaccacgtgactggcagcgactcatcaacaacaactggggattccggcccaagagactcagcttcaagctcttcaacatccaggtcaaggaggtcacgcagaatgaaggcaccaagaccatcgccaataacctcaccagcaccatccaggtgtttacggactcggagtaccagctgccgtacgttctcggctctgcccaccagggctgcctgcctccgttcccggcggacgtgttcatgattccccagtacggctacctaacactcaacaacggtagtcaggccgtgggacgctcctccttctactgcctggaatactttccttcgcagatgctgagaaccggcaacaacttccagtttacttacaccttcgaggacgtgcctttccacagcagctacgcccacagccagagcttggaccggctgatgaatcctctgattgaccagtacctgtactacttgtctcggactcaaacaacaggaggcacggcaaatacgcagactctgggcttcagccaaggtgggcctaatacaatggccaatcaggcaaagaactggctgccaggaccctgttaccgccaacaacgcgtctcaacgacaaccgggcaaaacaacaatagcaactttgcctggactgctgggaccaaataccatctgaatggaagaaattcattggctaatcctggcatcgctatggcaacacacaaagacgacaaggagcgtttttttcccagtaacgggatcctgatttttggcaaacaaaatgctgccagagacaatgcggattacagcgatgtcatgctcaccagcgaggaagaaatcaaaaccactaaccctgtggctacagaggaatacggtatcgtggcagataacttgcagcagcaaaacacggctcctcaaattggaactgtcaacagccagggggccttacccggtatggtctggcagaaccgggacgtgtacctgcagggtcccatctgggccaagattcctcacacggacggcaacttccacccgtctccgctgatgggcggctttggcctgaaacatcctccgcctcagatcctgatcaagaacacgcctgtacctgcggatcctccgaccaccttcaaccagtcaaagctgaactctttcatcacgcaatacagcaccggacaggtcagcgtggaaattgaatgggagctgcagaaggaaaacagcaagcgctggaaccccgagatccagtacacctccaactactacaaatctacaagtgtggactttgctgttaatacagaaggcgtgtactctgaaccccaccccattggcacccgttacctcacccgtcccctgtaa

SEQ ID NO: 1209 - DNA, 2217 bp, Artificial Sequence
  Synthetic polynucleotide
atggctgccgatggttatcttccagattggctcgaggacaacctctctgagggaataagacagtggtggaagctcaaacctggcccaccaccaccaaagcccgcagagcggcataaggacgacagcaggggtcttgtgcttcctgggtacaagtacctcggacccttcaacggactcgacaagggagagccggtcaacgcggcggacgcagcggccctcgagcacgacaaggcctacgaccagcagctcaaagcgggtgacaatccgtacctgcggtataaccacgccgacgccgagtttcaggagcgtctgcaagaagatacgtcttttgggggcaacctcgggcgagcagtcttccaggccaagaagcgggttctcgaacctctcggtctggttgaggaaggcgctaagacggctcctggaaagaagagaccggtagagccatcaccccagcgttctccagactcctctacgggcatcggcaagaaaggccagcagcccgctaaaaagagactcaattttggtcagactggcgactcagagtcagtccccgacccacaacctctcggagaacctccagcaacccccgctgctgtgggacctactacaatggcttcaggcggtggcgcaccaatggcagacaataacgaaggcgccgacggagtgggtaatgcctcaggaaattggcattgcgattccacatggctgggggacagagtcatcaccaccagcacccgaacctgggccctgcccacctacaacaaccacctctacaagcaaatctccaacgggacttcgggaggaagcaccaacgacaacacctacttcggctgcgtcacgccctgggggtattttgactttaacaaattccactgccacttttcaccggatgactggcaacgactcatcaacaacggctggggattccggactaagcgactcaacttcaagctcttcagcatgaaagtcaaaaagggtacggacaacactggaatcaagaccatcgcgaataaccttaccaacacggtccatgtcttcgcggactcggagtaccagttgccgtacgtcctcggctctgcgcaccagggctgcctccctccgttcccggcggacgtgttcatgattccgcagtacggctacctaacgctcaacaatggcagccaggcagtgggacggtcatccttttactgcctggaatatttcccatcgcagatgctgagaacgggcaacaactttaccttcagctacacctttgaggacgttcctttccacagcagctacgctcacagccagagtctggaccgtctcatgaatcctctgattgaccagtacctgtactacttgtctcggactcaaacaacaggaggcacggcaaatacgcagactctgggcttcagccaaggtgggcctaatacaatggccaatcaggcaaagaactggctgccaggaccctgttaccgccaacaacgcgtctcaacgacaaccgggcaaaacaacaatagcaactttgcctggactgctgggaccaaataccatctgaatggaagaaattcattggctaatcctggcatcgctatggcaacacacaaagacgacaaggagcgtttttttcccagtaacgggatcctgatttttggcaaacaaaatgctgccagagacaatgcggattacagcgatgtcatgctcaccagcgaggaagaaatcaaaaccactaaccctgtggctacagaggaatacggtatcgtggcagataacttgcagcagcaaaacacggctcctcaaattggaactgtcaacagccagggggccttacccggtatggtctggcagaaccgggacgtgtacctgcagggtcccatctgggccaagattcctcacacggacggcaacttccacccgtctccgctgatgggcggctttggcctgaaacatcctccgcctcagatcctgatcaagaacacgcctgtacctgcggatcctccgaccaccttcaaccagtcaaagctgaactctttcatcacgcaatacagcaccggacaggtcagcgtggagatcgagtgggagctgcagaaggaaaacagcaagcgctggaacccggagatccagtacacctccaactactacaaatctacaagtgtggactttgctgttaatacagaaggcgtgtactctgaaccccaccccattggcacccgttacctcacccgtcccctgtaa

SEQ ID NO: 1210 - DNA, 2214 bp, Artificial Sequence
  Synthetic polynucleotide
atggctgccgatggttatcttccagattggctcgaggacactctctctgaaggaataagacagtggtggaagctcaaacctggcccaccaccaccaaagcccgcagagcggcataaggacgacagcaggggtcttgtgcttcctgggtacaagtacctcggacccttcaacggactcgacaagggggagcccgtcaacgcggcggacgcagcggccctcgagcacgacaaggcctacgaccagcagctcaaagcgggtgacaatccgtacctgcggtataaccacgccgacgccgagtttcaggagcgtctgcaagaagatacgtcttttgggggcaacctcgggcgagcagtcttccaggccaagaagcgggttctcgaacctctcggtctggttgaggaaggcgctaagacggctcctggaaagaagagaccggtagagccatcaccccagcgttctccagactcctctacgggcatcggcaagaaaggccagcagcccgcgaaaaagagactcaactttgggcagactggcgactcagagtcagtgcccgaccctcaaccaatcggagaaccccccgcaggcccctctggtctgggatctggtacaatggctgcaggcggtggcgctccaatggcagacaataacgaaggcgccgatggagtgggtagttcctcgggaaattggcattgcgattccacatggctgggggacagagtcatcaccaccagcacccgaacctgggccctgcccacctacaacaaccacctctacaaacaaatttccagcgcttcaacgggagcctcgaacgacaatcactactttggctacagcaccccctgggggtattttgacttcaacagattccactgccacttctcaccacgtgactggcagcgactcatcaacaacaactggggattccggcctaagcgactcaacttcaagctcttcaacattcaggtcaaagaggttacggacaacaatggagtcaagaccatcgccaataaccttaccagcacggtccaggtcttcacggactcggagtaccagttgccgtacgtcctcggctctgcgcaccagggctgcctccctccgttcccggcggacgtgttcatgattccgcagtacggctacctaacgctcaacaatggcagccaggcagtgggacggtcatccttttactgcctggaatatttcccatcgcagatgctgagaacgggcaacaactttaccttcagctacacctttgaggacgttcctttccacagcagctacgctcacagccagagtctggaccgtctcatgaatcctctgattgaccagtacctgtactacttgtctcggactcaaacaacaggaggcacggcaaatacgcagactctgggcttcagccaaggtgggcctaatacaatggccaatcaggcaaagaactggctgccaggaccctgttaccgccaacaacgcgtctcaacgacaaccgggcaaaacaacaatagcaactttgcctggactgctgggaccaaataccatctgaatggaagaaattcattggctaatcctggcatcgctatggcaacacacaaagacgacaaggagcgtttttttcccagtaacgggatcctgatttttggcaaacaaaatgctgccagagacaatgcggattacagcgatgtcatgctcaccagcgaggaagaaatcaaaaccactaaccctgtggctacagaggaatacggtatcgtggcagataacctgcagcagcaaaacacggctcctcaaattggaactgtcaacagccagggggccttacccggtatggtctggcagaaccgggacgtgtacctgcagggtcccatctgggccaagattcttcacacggacggcaactttcacccttctccgctgatgggagggtttggaatgaagcacccgcctcctccgatcctgatcaagaacacgcctgtacctgcggatcctccgaccaccttcaaccagtcaaagctgaactctttcatcacgcaatacagcaccggacaggtcagcgtggaaattgaatgggagctgccgaaggaaaacagcaagcgctggaaccccgagatccagtacacctccaactactacaaatctacaagtgtggactttgctgttaatacagaaggtgtgtactatgaaccccaccccattggcacccgttacctcacccctcccctgtaa

SEQ ID NO: 1211 - DNA, 2214 bp, Artificial Sequence
  Synthetic polynucleotide
atggctgccgatggttatcttccagattggctcgaggacaacctctctgagggcattcgcgagtggtgggcgctgaaacctggagccccgaagcccaaagccaaccagcaaaagcaggacgacggccggggtctggtgcttcctggctacaagtacctcggacccttcaacggactcgacaagggggagcccgtcaacgcggcggacgcagcggccctcgagcacgacaaggcctacgaccagcagctcaaagcgggtgacaatccgtacctgcggtataaccacgccgacgccgagtttcaggagcgtctgcaagaagatacgtcttttgggggcaacctcgggcgagcagtcttccaggccaagaagcgggttctcgaacctctcggtctggttgaggaaggcgctaagacggctcctggaaagaagagaccggtagagccatcaccccagcgctctccagactcctctacgggcatcggcaagaaaggccaacagcccgccagaaaaagactcaattttggtcagactggcgactcagagtcagttccagaccctcaacctctcggagaacctccagcagcgccctctggtgtggcacctaatacaatggctgcaggcggtggcgcaccaatggcagacaataacgaaggcgccgacggagtgggtaatgcctcaggaaattggcattgcgattccacatggctgggcgacagagtcatcaccaccagcacccgaacatgggccttgcccacctataacaaccacctctacaagcaaatctccagtgcttcaacgggggccagcaacgacaaccactacttcggctacagcaccccctgggggtattttgatttcaacagattccactgccacttttcaccacgtgactggcagcgactcatcacaacaattgggggattccggcctaagcgactcaacttcaagctcttcaacattcaggtcaaagaggttacggacaacaatggagtcaagaccatcgccaataaccttaccagcacggtccaggtcttcacggactcggagtaccagttgccgtacgtcctcggctctgcgcaccagggctgcctccctccgttcccggcggacgtgttcatgattccgcagtacggctacctaacgctcaacaatggcagccaggcagtgggacggtcatccttttactgcctggaatatttcccatcgcagatgctgagaacgggcaacaactttaccttcagctacacctttgaggacgttcctttccacagcagctacgctcacagccagagtctggaccggctgatgaatcctctgattgaccagtacctgtactacttgtctcggactcaaacaacaggaggcacggcaaatacgcagactctgggcttcagccaaggtgggcctaatacaatggccaatcaggcaaagaactggctgccaggaccctgttaccgccaacaacgcgtctcaacgacaaccgggcaaaacaacaatagcaactttgcctggactgctgggaccaaataccatctgaatggaagaaattcattggctaatcctggcatcgctatggcaacacacaaagacgacaaggagcgtttttttcccagtaacgggatcctgatttttggcaaacaaaatgctgccagagacaatgcggattacagcgatgtcatgctcaccagcgaggaagaaatcaaaaccactaaccctgtggctacagaggaatacggtatcgtggcagataacttgcagcagcaaaacacggctcctcaaattggaactgtcaacagccagggggccttacccggtatggtctggcagaaccgggacgtgtacctgcagggtcccatctgggccaagattcctcacacggacggcaacttccacccgtctccgctgatgggcggctttggcctgaaacatcctccgcctcagatcctgatcaagaacacgcctgtacctgcggatcctccgaccaccttcaaccagtcaaagctgaactctttcatcacgcaatacagcaccggacaggtcagcgtggaaattgaatgggagctgcagaaggaaaacagcaagcgctggaaccccgagatccagtacacctccaactactacaaatctacaagtgtggactttgctgttaatacagaaggcgtgtactctgaaccccaccccattggcacccgttacctcacccgtcccctgtaa

SEQ ID NO: 1212 - DNA, 2211 bp, Artificial Sequence
  Synthetic polynucleotide
atggctgccgatggttatcttccagattggctcgaggacactctctctgaaggaataagacagtggtggaagctcaaacctggcccaccaccaccaaagcccgcagagcggcataaggacgacggccggggtctggtgcttcctggctacaagtacctcggacccttcaacggactcgacaagggggagcccgtcaacgcggcggacgcagcggccctcgagcacgacaaggcctacgaccagcagctcaaagcgggtgacaatccgtacctgcggtataaccacgccgacgccgagtttcaggagcgtctgcaagaagatacgtcttttgggggcaacctcggacgagcagtcttccaggcgaaaaagagggttcttgaacctctgggcctggttgaggaacctgttaagacggctccgggaaaaaagaggccggtagagcagtcgccacaagagccagactcctcctcgggcatcggcaagaaaggccagcagcccgctaaaaagagactcaattttggtcagactggcgactcagagtcagtccccgacccacaacctctcggagaacctccagcaacccccgctgctgtgggacctactacaatggcttcaggcggtggcgcaccaatggcagacaataacgaaggcgccgacggagtgggtaatgcctcaggaaattggcattgcgattccacatggatgggcgacagagtcatcaccaccagcacccgaacatgggccttgcccacctataacaaccacctctacaagcaaatctccagtgcttcaacgggggccagcaacgacaaccactacttcggctacagcaccccctgggggtattttgactttaacagattccactgccacttttcaccacgtgactggcagcgactcatcaacaacaactggggattccggcctaagcgactcaacttcaagctcttcaacattcaggtcaaggaggtcacgcagaatgaaggcaccaagaccatcgccaataacctcaccagcaccatccaggtgtttacggactcggagtaccagctgccgtacgttctcggctccgcccaccagggctgcctgcctccgttcccggcggacgtgttcatgatcccccagtacggctacctaacactcaacaacggtagtcaggccgtgggacgctcctccttctactgcctggaatactttccttcgcagatgctgagaaccggcaacaacttccagtttacttacaccttcgaggacgtgcctttccacagcagctacgcgcacagccagagcttggaccggctgatgaatcctctgattgaccagtacctgtactacttgtctcggactcaaacaacaggaggcacggcaaatacgcagactctgggcttcagccaaggtgggcctaatacaatggccaatcacgcaaagaactggctgccaggaccctgttaccgccaacaacgcgtctcaacgacaaccgggcaaaacaacaatagcaactttgcctggactgctgggaccaaataccatctgaatggaagaaattcattggctaatcctggcatcgctatggcaacacacaaagacgacaaggagcgtttttttcccagtaacgggatcctgatttttggcaaacaaaatgctgccagagacaatgcggattacagcgatgtcatgctcaccagcgaggaagaaatcaaaaccactaaccctgtggctacagaggaatacggtatcgtggcagataacttgcagcagcaaaacacggctcctcaaattggaactgtcaacagccagggggccttacccggtatggtctggcagaaccgggacgtgtacctgcagggtcccatctgggccaagattcctcacacggacggcaacttccacccgtctccgctgatgggcggcttcggcctgaaacatcctccgcctcagatcctgatcaagaacacgcctgtacctgcggatcctccgaccaccttcaaccagtcaaagctgaactctttcatcacgcaatacagcaccggacaggtcagcgtggaaattgaatgggagctgcagaaggaaaacagcaagcgctggaaccccgagatccagtacacctccaactactacaaatctacaagtgtggactttgctgttaatacagaaggcgtgtactctgaaccccaccccattggcacccgttacctcacccgtcccctgtaa

SEQ ID NO: 1213 - DNA, 2214 bp, Artificial Sequence
  Synthetic polynucleotide
atggctgccgatggttatcttccagattggctcgaggacaacctctctcagggcattcgcgagtggtgggacttgaaacctggagccccgaaacccaaagccaaccagcaaaagcaggacgacggccggggtctggtgcttcctggctacaagtacctcggacccttcaacggactcgacaagggggagcccgtcaacgcggcggacgcagcggccctcgagcacgacaaggcctacgaccagcagctcaaagcgggtgacaatccgtacctgcggtataaccacgccgacgccgagtttcaggagcgtctgcaagaagatacgtcttttgggggcaacctcggacgagcagtcttccaggccaagaagcgggttctcgaacctctcggtctggttgaggaaggcgctaagacggctcctggaaagaagagaccggtagagccatcaccccagcgttctccagactcctctacgggcatcggcaagaaaggccaacagcccgccagaaaaagactcaattttggtcagactggcgactcagagtcagttccagaccctcaacctctcggagaacctccagcagcgcccgctgctgtgggacctactacaatggcttcaggcggtggcgcaccaatggcagacaataacgaaggcgccgacggagtgggtagttcctcgggaaattggcattgcgattcccaatggctgggggacagagtcatcaccaccagcacccgaacctgggccctgcccacctacaacaaccacctctacaagcaaatctccagtgcttcaacgggggccagcaacgacaaccactacttcggctacagcaccccctgggggtattttgacttcaacagattccactgccacttttcaccacgtgactggcaaagactcatcaacaacaactggggattccggcccaagagactcagcttcaagctcttcaacatccaggtcaaggaggtcacgcagaatgaaggcaccaagaccatcgccaataacctcaccagcaccatccaggtgtttacggactcggagtaccagctgccgtacgttctcggctctgcccaccagggctgcctgcctccgttcccggcggacgtgttcatgattccccagtacgggtacctgactctgaacaatggcagtcaggccgtgggccgttcctccttctactgcctggagtactttccttctcaaatgctgagaaccggcaacaacttccagtttacttacaccttcgaggacgtgcctttccacagcagctacgcccacagccagagcttggaccggctgatgaatcctctgattgaccagtacctgtactacttgtctcggactcaaacaacaggaggcacgacaaatgcgcagactctgggcttcagccaaggtgggcctaatacaatggccaatcaggcaaagaactggctgccaggaccctgttaccgccaacaacgcgtctcaacgacaaccgggcaaaacaacaatagcaactttgcctggactgctgggaccaaataccatctgaatggaagaaattcattggctaatcctggcatcgctatggcaacacacaaagacgacaaggagcgtttttttcccagtaacgggatcctgatttttggcaaacaaaatgctgccagagacaatgcggattacagcgatgtcatgctcaccagcgaggaagaaatcaaaaccactaaccctgtggctacagaggaatacggtatcgtggcagataacttgcagcagcaaaacacggctcctcaaattggaactgtcaacagccagggggccttacccggtatggtctggcagaaccgggacgtgtacctgcagggtcccatctgggccaagattcctcacacggacggcaacttccacccgtctccgctgatgggcggctttggcctgaaacatcctccgcctcagatcctgatcaagaacacgcctgtacctgcggatcctccgaccaccttcaaccagtcaaagctgaactctttcatcacacagtactccacgggacaggtcagcgtggaaattgaatgggagctgcagaaggaaaacagcaagcgctggaacccggagatccagtacacttccaactactacaaatctacaaatgtggactttgctgttaacacagaaggcgtgtactctgaaccccaccccattggcacccgttacctcacccgtcccctgtaa

SEQ ID NO: 1214 - DNA, 2211 bp, Artificial Sequence
  Synthetic polynucleotide
atggctgccgatggttatcttccagattggctcgaggacaacctctctgagggcattcgcgagtggtgggacttgaaacctggagccccgaaacccaaagccaaccagcaaaagcaggacgacggccggggtctggtgcttcctggctacaagtacctcggacccttcaacggactcgacaagggggagcccgtcaacgcggcggacgcagcggccctcgagcacgacaaggcctacgaccagcagctcaaagcgggtgacaatccgtacctgcggtataaccacgccgacgccgagtttcaggagcgtctgcaagaagatacgtcttttgggggcaacctcgggcgagcagtcttccaggccaagaagagggttctcgaaccttttggtctggttgaggaaggcgctaagacggctcctggaaagaaacgtccggtagagcagtcgccacaagagccagactcctcctcgggcatcggcaagacaggccagcagcccgctaaaaagagactcaatttcggtcagactggcgacacagagtcagtcccagaccctcaaccaatcggagaacctcccgcagccccctcaggtgtgggacctaatacaatggctgcaggcggtggcgcaccaatggcagacaataacgaaggcgccgacggagtgggtagttcctcgggaaattggcattgcgattccacatggatgggtgacagagtcatcaccaccagcacccgaacctgggccctgcccacctacaataaccacctctacaagcaaatctccagtgcttcaacgggggccagcaacgacaaccactacttcggctacagcaccccctgggggtattttgacttcaacagattccactgccacttctcaccacgtgactggcagcgactcatcaacaacaactggggattccggcctaagcgactcaacttcaagctcttcaacattcaggtcaaggaggtcacgcagaatgaaggcaccaagaccatcgccaataacctcaccagcaccatccaggtgtttacggactcggagtaccagctgccgtacgttctcggctctgcccaccagggctgcctgcctccgttcccggcggacgtgttcatgattccccagtacggctacctaacactcaacaacggtagtcaggccgtgggacgctcctccttctactgcctggaatactttccttcgcagatgctgagaaccggcaacaacttccagtttacttacaccttcgaggacgtgcctttccacagcagctacgcccacagccagagcttggaccggctgatgaatcctctgattgaccagtacctgtactacttgtctcggactcaaacaacaggaggcacggcaaatacgcagactctgggcttcagccaaggtgggcctaatacaatggccaatcaggcaaagaactggctgccaggaccctgttaccgccaacaacgcgtctcaacgacaaccgggcaaaacaacaatagcaactttgcctggactgctgggaccaaataccatctgaatggaagaaattcattggctaatcctggcatcgctatggcaacacacaaagacgacaaggagcgtttttttcccagtaacgggatcctgatttttggcaaacaaaatgctgccagagacaatgcggattacagcgatgtcatgctcaccagcgaggaagaaatcaaaaccactaaccctgtggctacagaggaatacggtatcgtggcagataacttgcagcagcaaaacacggctcctcaaattggaactgtcaacagccagggggccttacccggtatggtctggcagaaccgggacgtgtacctgcagggtcccatctgggccaagattcctcacacggacggcaacttccacccgtctccgctgatgggcggctttggcctgaaacatcctccgcctcagatcctgatcaagaacacgcctgtacctgcggatcctccgaccaccttcaaccagtcaaagctgaactctttcatcacacagtactccacgggacaggtcagcgtggaaattgaatgggagctgcagaaggaaaacagcaagcgctggaacccggagatccagtacacttccaactactacaaatctacaaatgtggactttgctgttaacacagaaggcgtgtactctgaaccccaccccattggcacccgttacttcacccgtcccctgtaa

SEQ ID NO: 1215 - DNA, 2211 bp, Artificial Sequence
  Synthetic polynucleotide
atggctgccgatggttatcttccagattggctcgaggacaacctctctgagggcattcgcgagtggtgggacttgaaacctggagccccgaaacccaaagccaaccagcaaaagcaggacgacggccggggtctggtgcttcctggctacaagtacctcggacccttcaacggactcgacaagggggagcccgtcaacgcggcggacgcagcggccctcgagcacgacaaggcctacgaccagcagctcaaagcgggtgacaatccgtacctgcggtataaccacgccgacgccgagtttcaggagcgtctgcaagaagatacgtcttttgggggcaacctcgggcgagcagtcttccaggccaagaagcgggttctcgaacctctcggtctggttgaggaaggcgctaagacggctcctggaaagaaacgtccggtagagcagtcgccacaagagccagactcctcctcgggcatcggcaagacaggccagcagcccgctaaaaaaagactcaattttggtcagactggcgactcagagtcagttccagaccctcaacctctcggagaacctccagcaacccccgctgctgtgggacctactacaatggcttcaggtggtggcgcaccaatggcagacaataacgagggcgccgacggagtgggtaattcctcgggaaattggcattgcgattccacatggatgggcgacagagtcatcaccaccagcacccgaacctgggccctgcccacctacaacaatcacctctacaagcaaatctccagtgcttcaacgggggccagcaacgacaaccactacttcggctacagcaccccctgggggtattttgacttcaacagattccactgccacttctcaccacgtgactggcagcgactcatcaacaacaactggggattccggcctaagcgactcaacttcaagctcttcaacattcaggtcaaagaggttacggacaacaatggagtcaagaccatcgccaataaccttaccagcacggtccaggtcttcacggactcggagtaccagttgccgtacgtcctcggctctgcgcaccagggctgcctccctccgttcccggcggacgtgttcatgattccgcagtacggctacctaacgctcaacaacggtagtcaggccgtgggacgctcctccttctactgcctggaatactttccttcgcagatgctgagaaccggcaacaacttccagtttacttacaccttcgaggacgtgcctttccacagcagctacgcccacagccagagcttggaccggctgatgaatcctctgattgaccagtacctgtactacttgtctcggactcaaacaacaggaggcacggcaaatacgcagactctgggcttcagccaaggtgggcctaatacaatggccaatcaggcaaagaactggctgccaggaccctgttaccgccaacaacgcgtctcgacgacaaccgggcaaaacaacaatagcaactttgcctggactgctgggaccaaataccatctgaatggaagaaattcattggctaatcctggcatcgctatggcaacacacaaagacgacaaggagcgtttttttcccagtaacgggatcctgatttttggcaaacaaaatgctgccagagacaatgcggattacagcgatgtcatgctcaccagcgaggaagaaatcaaaaccactaaccctgtggctacagaggaatacggtatcgtggcagataacttgcagcagcaaaacacggctcctcaaattggaactgtcaacagccagggggccttacccggtatggtttggcagaaccgggacgtgtacctgcagggtcccatctgggccaagattcctcacacggacggcaacttccacccgtctccgctgatgggcggctttggcctgaaacatcctccgcctcagatcctgatcaagaacacgcctgtacctgcggatcctccgaccaccttcaaccagtcaaagctgaactctttcatcacacagtactccacgggacaggtcagcgtggaaattgaatgggagctgcagaaggaaaacagcaagcgctggaacccggagatccagtacacttccaactactacaaatctacaaatgtggactttgctgttaacacagaaggcgtgtactctgaaccccaccccattggcacccgttacctcacccgtcccctgtaa

SEQ ID NO: 1216 - DNA, 2211 bp, Artificial Sequence
  Synthetic polynucleotide
atggctgccgatggttatcttccagattggctcgaggacaacctctctgagggcattcgcgagtggtgggacttgaaacctggagccccgaagcccaaagccaaccagcaaaagcaggacgacggccggggtctggtgcttcctggctacaagtacctcggacccttcaacggactcgacaagggggagcccgtcaacgcggcggacgcagcggccctcgagcacgacaaggcctacgaccagcagctcaaagcgggtgacaatccgtacctgcggtataaccacgccgacgccgagtttcaggagcgtctgcaagaagatacgtcttttgggggcaacctcgggcgagcagtcttccaggccaagaagcgggttctcgaacctctcggtctggttgaggaaggcgctaagacggctcctggaaagaaacgtccggtagagcagtcaccacaagagccagactcctcctcgggcatcggcaagacaggccagcagcccgctaaaaagagactcaattttggtcagactggcgactcagagtcagtccccgacccacaacctctcggagaacctccagcaacccccgctgctgtgggacctactacaatggcttcaggcggtggcgcaccaatggcggacaataacgaaggcgccgatggagtgggtaatgcctcaggaaattggcattgcgattccacatggctgggcgacagagtcatcaccaccagcacccgaacatgggccttgcccacctataacaaccacctctacaagcaaatctccagtgcttcaacgggggccagcaacgacaaccactacttcggctacagcaccccctgggggtattttgactttaacagattccactgccacttctcaccacgtgactggcagcgactcatcaacaacaactggggattccggcccaagagactcaacttcaagctcttcaacatccaggtcaaggaggtcacgcagaatgaaggcaccaagaccatcgccaataacctcaccagcaccatccaggtgtttacggactcggagtaccagctgccgtacgttctcggctctgcccaccagggctgcctgcctccgttcccggcggacgtgttcatgattccccagtacggctacctgactctgaacaatggcagtcaggccgtgggccgttcctccttctactgcctagagtactttccttctcaaatgctgagaacgggcaacaactttgagttcagctaccagtttgaggacgtgccttttcacagcagctacgcgcacagccaaagcctggaccggctgatgaatcctctgattgaccagtacctgtactacttgtctcggactcaaacaacaggaggcacggcaaatacgcagactctgggcttcagccaaggtgggcctaatacaatggccaatcaggcaaagaactggctgccaggaccctgttaccgccaacaacgcgtctcaacgacaaccgggcaaaacaacaatagcaactttgcctggactgctgggaccaaataccatatgaatggaagaaattcattggttaatcctggcatcgctatggcaacacacaaagacgacaaggagcgtttttttcccagtaacgggatcctgatttttggcaaacaaaatgttgccagagacaatgcggattacagcgatgtcatgctcaccagcgaggaagaaatcaaaaccactaaccctgtggctacagaggaatacggtattgtggcagataacttgcagcagcaaaacacggctcctcaaattggaactgtcaacagccagggggccttacccggtatggtctggcagaaccgggacgtgtacctgcagggtcccatctgggccaagattcctcacacggacggcaacttccacccgtcgccgctgatgggcggctttggcctgaaacatcctccgcctcagatcctgatcaagaacacgcctgtacctgcggatcctccgaccaccttcaaccagtcaaagctgaactctttcatcacgcaatacagcaccggacaggtcagcgtggaaattgaatgggagctgcagaaggaaaacagcaagcgctggaaccccgagatccagtacacctccaactactacaaatctacaagtgtggactttgctgttaatacagaaggcgtgtactctgaaccccaccccattggcacccgttacctcacccgtcccctgtaa

SEQ ID NO: 1217 - protein, 736 aa, Artificial Sequence
  Synthetic polypeptide
MAADGYLPDWLEDTLSEGIRQWWKLKPGPPPPKPAERHKDDSRGLVLPGYKYLGPFNGLDKGEPVNEADAAALEHDKAYDRQLDSGDNPYLKYNHADAEFQERLKEDTSFGGNLGRAVFQAKKRVLEPLGLVEEPVKTAPGKKRPVEQSPQEPDSSSGIGKKGQQPAKKRLNFGQTGDSESVPDPQPLGEPPATPAAVGPTTMASGGGAPMADNNEGADGVGNASGNWHCDSTWMGDRVITTSTRTWALPTYNNHLYKQISSASTGASNDNHYFGYSTPWGYFDFNRFHCHFSPRDWQRLINNNWGFRPKRLNFRLFNIQVKEVTDNNGVKTIANNLTSTVQVFTDSEYQLPYVLGSAHQGCLPPFPADVFMIPQYGYLTLNNGSQAVGRSSFYCLEYFPSQMLRTGNNFTFSYTFEEVPFHSSYAHSQSLDRLMNPLIDQYLYYLSRTQTTGGTANTQTLGFSQGGPNTMANQAKNWLPGPCYRQQRVSTTTGQNNNSNFAWTAGTKYHLNGRNSLANPGIAMATHKDDKERFFPSNGILIFGKQNAARDNADYSDVMLTSEEEIKTTNPVATEEYGIVADNLQQQNTAPQIGTVNSQGALPGMVWQNRDVYLQGPIWAKIPHTDGNFHPSPLMGGFGLKHPPPQILIKNTPVPADPPTTFNQSKLNSFITQYSTGQVSVEIEWELQKENSKRWNPEIQYTSNYYKSTSVDFAVNTEGVYSEPHPIGTRYLTRPL

SEQ ID NO: 1218 - protein, 736 aa, Artificial Sequence
  Synthetic polypeptide
MAADGYLPDWLEDNLSEGIREWWDLKPASPKPKANQQKQDDGRGLVLPGYKYLGPFNGLDKGEPVNAADAAALEHDKAYDQQLKAGDNPYLRYNHADAEFQERLQEDTSFGGNLGRAVFQAKKRLLEPLGLVEEAAKTAPGKKRPVEQSPQEPDSSAGIGKSGAQPAKKRLNFGQTGGTESVPDPQPLGEPPAAPSGVGPNTMAAGGGAPMADNNEGADGVGSSSGNWHCDSTWLGDRVITTSTRTWALPTYNNHLYKQISSASTGASNDNHYFGYSTPWGYFDFNRFHCHFSPRDWQRLINNNWGFRPKRLSFKLFNIQVKEVTQNEGTKTIANNLTSTIQVFTDSEYQLPYVLGSAHQGCLPPFPADVFMIPQYGYLTLNNGSQAVGRSSFYCLEYFPSQMLRTGNNFQFTYTFEDVPFHSSYAHSQSLDRLMNPLIDQYLYYLSRTQTTGGTANTQTLGFSQGGPNTMANQAKNWLPGPCYRQQRVSTTTGQNNNSNFAWTAGTKYHLNGRNSLANPGIAMATHKDDKERFFPSNGILIFGKQNAARDNADYSDVMLTSEEEIKTTNPVATEEYGIVADNLQQQNTAPQIGTVNSQGALPGMVWQNRDVYLQGPIWAKIPHTDGNFHPSPLMGGFGLKHPPPQILIKNTPVPADPPTTFNQSKLNSFITQYSTGQVSVEIEWELQKENSKRWNPEIQYTSNYYKSTSVDFAVNTEGVYSEPHPIGTRYLTRPL

SEQ ID NO: 1219 - protein, 736 aa, Artificial Sequence; identical to SEQ ID NO: 1158
  Synthetic polypeptide

SEQ ID NO: 1220 - protein, 736 aa, Artificial Sequence
  Synthetic polypeptide
MAADGYLPDWLEDNLSEGIREWWDLEPGAPKPKANQQKQDDGRGLVLPGYKYLGPFNGLDKGEPVNAADAAALEHDKAYDQQLKAGDNPYLRYNHADAEFQERLQEDTSFGGNLGRAVFQAKKRVLEPLGLVEEGAKTAPGKKRPVEQSPQEPDSSSGIGKTGQQPAKKRLNFGQTGDSESVPDPQPLGEPPATPAAVGPTTMASGGGAPMADNNEGADGVGNASGNWHCDSTWLGDRVITTSTRTWALPTYNNHLYKQISSASTGASNDNHYFGYSTPWGYFDFNRFHCHFSPRDWQRLINNNWGFRPKRLNFKLFNIQVKEVTDNNGVKTIANNLTSTVQVFTDSEYQLPYVLGSAHQGCLPPFPADVFMIPQYGYLTLNNGSQAVGRSSFYCLEYFPSQMLRTGNNFQFTYTFEDVPFHSSYAHSQSLDRLMNPLIDQYLYYLSRTQTTGGTANTQTLGFSQGGPNTMANQAKNWLPGPCYRQQRVSTTTGQNNNSNFAWTAGTKYHLNGRNSLANPGIAMATHKDDKERFFPSNGILIFGKQNAARDNADYSDVMLTSEEEIKTTNPVATEEYGIVADNLQQQNTAPQIGTVNSQGALPGMVWQNRDVYLQGPIWAKIPHTDGNFHPSPLMGGFGLKHPPPQILIKNTPVPADPPTTFNQSKLNSFITQYSTGQVSVEIEWELQKENSKRWNPEIQYTSNYYKSTSVDFAVNTEGVYSEPHPIGTRYLTRPL

SEQ ID NO: 1221 - protein, 736 aa, Artificial Sequence; identical to SEQ ID NO: 1158
  Synthetic polypeptide

SEQ ID NO: 1222 - protein, 736 aa, Artificial Sequence
  Synthetic polypeptide
MAADGYLPDWLEDTLSEGIRQWWKLKPGPPPPKPAERHKDDSRGLVLPGYKYLGPFNGLDKGEPVNEADAAALEHDKAYDRQLDSGDNPYLKYNHADAEFQERLKEDTSFGGNLGRAVFQAKKRVLEPLGLVEEPVKTAPGKKRPVEQSPQEPDSSSGIGKKGQQPAKKRLNFGQTGDSESVPDPQPLGEPPATPAAVGPTTMASGGGAPMADNNEGADGVGNASGNWHCDSTWLGDRVITTSTRTWALPTYNNHLYKQISSASTGASNDNHYFGYSTPWGYFDFNRFHCHFSPRDWQRLINNNWGFRPKRLNFKLFNIQVKEVTDNNGVKTIANNLTSTVQVFTDSDYQLPYVLGSAHQGCLPPFPADVFMIPQYGYLTLNNGSQAVGRSSFYCLEYFPSQMLRTGNNFQFTYTFEDVPFHSSYAHSQSLDRLMNPLIDQYLYYLSRTQTTGGTANTQTLGFSQGGPNTMANQAKNWLPGPCYRQQRVSTTTGQNNNSNFAWTAGTKYHLNGRNSLANPGIAMATHKDDKERFFPSNGILIFGKQNAARDNADYSDVMLTSEEEIKTTNPVATEEYGIVADNLQQQNTAPQIGTVNSQGALPGMVWQNRDVYLQGPIWAKIPHTDGNFHPSPLMGGFGLKHPPPQILIKNTPVPADPPTTFNQSKLNSFITQYSTGQVSVEIEWELQKENSKRWNPEIQYTSNYYKSTSVDFAVNTEGVYSEPHPIGTRYLTRPL

SEQ ID NO: 1223 - protein, 734 aa, Artificial Sequence
  Synthetic polypeptide
MAADGYLPDWLEDTLSEGIRQWWKLKPGPPPPKPAERHKDDSRGLVLPGYKYLGPFNGLDKGEPVNEADAAALEHDKAYDQQLQAGDNPYLRYNHADAEFQERLQGDTSFGGNLGRAVFQAKKRLLEPLGLVEEAAKTAPGKKRPVEQSPQEPDSSAGIGKSGAQPAKKRLNFGQTGDTESVPDPQPIGEPPAAPSGVGSLTMASGGGAPVADNNEGADGVGSSSGNWHCDSQWLGDRVITTSTRTWALPTYNNHLYKQISSASTGASNDNHYFGYSTPWGYFDFNRFHCHFSPRDWQRLINNNWGFRPKRLSFKLFNHPGQGGHAERHQDHRQPHQHIQVFTDSEYQLPYVLGSAHQGCLPPFPADVFMIPQYGYLTLNNGSQAVGRSSFYCLEYFPSQMLRTGNNFQFTYTFEDVPFHSSYAHSQSLDRLMNPLIDQYLYYLSRTQTTGGTANTQTLGFSQGGPNTMANQAKNWLPGPCYRQQRVSTTTGQNNNSNFAWTAGTKYHLNGRNSLGNPGIAMATHKDDKERFFPSNGILIFGKQNAARDNADYSDVMLTSEEEIKTTNPVATEEYGIVADNLQQQNTAPQIGTVNSQGALPGMVWQNRDVYLQGPIWAKIPHTDGNFHPSPLMGGFGLKHPPPQILIKNTPVPADPPTAFNQSKLNSFITQYSTGQVSVEIEWELQKENSKRWNPEIQYTSNYYKSTSVDFAVNTEGVYSEPHPIGTRYLTRPL

SEQ ID NO: 1224 - protein, 737 aa, Artificial Sequence
  Synthetic polypeptide
MAADGYLPDWLEDNLSEGIREWWDLKHGAPKPKANQQKQDDGRGLVLPGYKYLGPFNGLDKGEPVNAADAAALEHDKAYDQQLKAGDNPYLRYNHADAEFQERLQEDTSFGGNLGRAVFQAKKRVLEPFGLVEEGAKTAPGKKRPVEQSPQEPDSSSGIGKTGQQPAKKRLNFGQTGDSESVPDPQPLGEPPATPAAVGPTTMASGGGAPMADNNEGADGVGNASGNWHCDSTWLGDRVITTSTRTWALPTYNNHLYKQISNGTSGGSTNDNTYFGYSTPWGYFDFNRFHCHFSPRDWQRLINNNWGFRPKRLNFKLFNIQVKEVTQNEGTKTIANNLTSTIQVFTDSEYQLPYVLGSAHQGCLPPFPADVFMIPQYGYLTLNNGSQAVGRSSFYCLEYFPSQMLRTGNNFTFSYTFEDVPFHSSYAHSQSLDRLMNPLIDQYLYYLSRTQTTGGTANTQTLGFSQGGPNTMANQAKNWLPGPCYRQQRVSTTTGQNNNSNFAWTAGTKYHLNGRNSLANPGIAMATHKDDKERFFPSNGILIFGKQNAARDNADYSDVMLTSEEEIKTTNPVATEEYGIVADNLQQQNTAPQIGTVNSQGALPGMVWQNRDVYLQGPIWAKIPHTDGNFHPSPLMGGFGLKHPPPQILIKNTPVPADPPTTFNQSKLNSFITQYSTGQVSVEIEWELQKENSKRWNPEIQYTSNYYKSTSVDFAVNTEGVYSDPHPIGTRYLTRPL

SEQ ID NO: 1225 - protein, 737 aa, Artificial Sequence
  Synthetic polypeptide
MAADGYLPDWLEDNLSEGIREWWALKPGAPKPKANQQKQDDGRGLVLPGYKYLGPFNGLDKGEPVNEADAAALEHDKAYDQQLKAGDNPYLRYNHADAEFQERLQEDTSFGGNLGRAVFQAKKRVLEPLGLVEEGAKTAPGKKRPVEPSPQRSPDSSTGIGKKGQQPARKRLNFGQTGDSESVPDPQPLGEPPAAPSGVGPNTMASGGGAPMADNNEGADGVGNSSGNWHCDSTWMGDRVITTSTRTWALPTYNNHLYKQISSASTGASNDNHYFGYSTPWGYFDFNRFHCHFSPRDWQRLINNNWGFRPKRLNFKLFNIQVKEVTQNEGTKTIANNLTSTIQVFTDSEYQLPYVLGSAHQGCLPPFPADVFMIPQYGYLTLNNGSQAVGRSSFYCLEYFPSQMLRTGNNFQFTYTFEDVPFHSSYAHSQSLDRLMNPLIDQYLYYLSRTQTTGGTANTQTLGFSQGGPNTMANQAKNWLPGPCYRQQRVSTTTGQNNNSNFAWTAGTKYHLNGRNSLANPGIAMATHKDDKERFFPSNGILIFGKQNAARDNADYSDVMLTSEEEIKTTNPVATEEYGIVADNLQQQNTAPQIGTVNSQGALPGMVWQNRDVYLQGPIWAKIPHTDGNFHPSPLMGGFGLKHPPPQILIKNTPVPADPPTTFNQSKLNSFITQYSTGQVSVEIEWELQKENSKRWNPEIQYTSNYYKSTSVDFAVNTEGVYSEPHPIGTRYLTRPL

SEQ ID NO: 1226 - protein, 736 aa, Artificial Sequence
  Synthetic polypeptide
  MOD_RES (226)..(226): Any naturally occurring amino acid
MAADGYLPDWLEDTLSEGIRQWWKLKPGPPPPKPAERHKDDSRGLVLPGYKYLGPFNGLDKGEPVNEADAAALEHDKAYDRQLDSGDNPYLKYNHADAEFQERLKEDTSFGGNLGRAVFQAKKRVLEPLGLVEEPVKTAPGKKRPVEQSPQEPDSSSGIGKKGQQPAKKRLNFGQTGDSESVPDPQPLGEPPATPAAVGPTTMASGGGAPMADNNEGADGVGNASXNWHCDSTWLGDRVITTSTRTWALPPITTTSTSKSPVLQRGRSNDNHYFGYSTPWGYFDFNRFHCHFSPRDWQRLINNNWGFRPKRLNFKLFNIQVKEVTDNNGVKTIANNLTSTVQVFTDSDYQLPYVLGSAHQGCLPPFPADVFMIPQYGYLTLNNGSQAVGRSSFYCLEYFPSQMLRTGNNFQFTYTFEDVPFHSSYAHSQSLDRLMNPLIDQYLYYLSRTQTTGGTANTQTLGFSQGGPNTMANQAKNWLPGPCYRQQRVSTTTGQNNNSNFAWTAGTKYHLNGRNSLANPGIAMATHKDDKERFFPSNGILIFGKQNAARDNADYSDVMLTSEEEIKTTNPVATEEYGIVADNLQQQNTAPQIGTVNSQGALPGMVWQNRDVYLQGPIWAKIPHTDGNFHPSPLMGGFGLKHPPPQILIKNTPVPADPPTTFNQSKLNSFITQYSTGQVSVEIEWELQKENSKRWNPEIQYTSNYYKSTNVDFAVNTEGVYSEPHPIGTRYLTRPL

SEQ ID NO: 1227 - protein, 736 aa, Artificial Sequence
  Synthetic polypeptide
  MOD_RES (239)..(239): Any naturally occurring amino acid
MAADGYLPDWLEDNLSEGIREWWDLKPGAPKPKANQQKQDDGRGLVLPGYKYLGPFNGLDKGEPVNAADAAALEHDKAYDQQLQAGDNPYLRYNHADAEFQERLQGDTSFGGNLGRAVFQAKKRVLEPLGLVEEAAKTAPGKKRPVEQSPQEPDSSAGIGKSGAQPAKKRLNFGQTGDTESVPDPQPIGEPPAAPSGVGPNTMAAGGGAPMADNNEGADGVGSSSGNWHCDSTWLGDRXITTSTRTWALPTYNNHLYKQISSASTGASNDNHYFGYSTPWGYFDFNRFHCHFSPRDWQRLINNNWGFRPKRLNFKLFNIQVKEVTDNNGVKTIANNLTSTVQVFTDSEYQLPYVLGSAHQGCLPPFPADVFMIPQYGYLTLNNGSQAVGRSSFYCLEYFPSQMLRTGNNFTFSYTFEDVPFHSSYAHSQSLDRLMNPLIDQYLYYLSRTQTTGGTANTQTLGFSQGGPNTMANQAKNWLPGPCYRQQRVSTTTGQNNNSNFAWTAGTKYHLNGRNSLANPGIAMATHKDDKERFFPSNGILIFGKQNAARDNADYSDVMLTSEEEIKTTNPVATEEYGIVADNFQQQNTAPQIGTVNSQGALPGMVWQNRDVYLQGPIWAKIPHTDGNFHPSPLMGGFGLKHPPPQILIKNTPVPADPPTTFNQSKLNSFITQYSTGQVSVEIEWELQKENSKRWNPEIQYTSNYYKSTSVDFAVNTEGVYSEPHPIGTRYLTRPL

SEQ ID NO: 1228 - protein, 736 aa, Artificial Sequence
  Synthetic polypeptide
MAADGYLPDWLEDNLSEGIREWWALKPGAPKPKANQQKQDDGRGLVLPGYKYLGPFNGLDKGEPVNEADAAALEHDKAYDQQLKAGDNPYLKYNHADAEFQERLQEDTSFGGNLGRAVFQAKKRLLEPLGLVEEAAKTAPGKKRPVEQSPQEPDSSAGIGKSGAQPAKKRLNFGQTGDTESVPDPQPLGEPPATPAAVGPTTMASGGGAPMADNNEGADGVGNASGNWHCDSTWLGDRVITTSTRTWALPTYNNHLYKQISSASTGASNDNHYFGYSTPWGYFDFNRFHCHFSPRDWQRLINNNWGFRPKRLSFKLFNIQVKEVTQNEGTKTIANNLTSTIQVFTDSEYQLPYVLGSAHQGCLPPFPADVFMIPQYGYLTLNNGSQAVGRSSFYCLEYFPSQMLRTGNNFQFTYTFEDVPFHSSYAHSQSLDRLMNPLIDQYLYYLSRTQTTGGTANTQTLGFSQGGPNTMANQAKNWLPGPCYRQQRVSTTTGQNNNSNFAWTAGTKYHLNGRNSLANPGIAMATHKDDKERFFPSNGILIFGKQNAARDNADYSDVMLTSEEEIKTTNPVATEEYGIVADNLQQQNTAPQIGTVNSQGALPGMVWQNRDVYLQGPIWAKIPHTDGNFHPSPLMGGFGLKHPPPQILIKNTPVPADPPTTFNQSKLNSFITQYSTGQVSVEIEWELQKENSKRWNPEIQYTSNYYKSTSVDFAVNTEGVYSEPHPIGTRYLTRPL

SEQ ID NO: 1229 - protein, 736 aa, Artificial Sequence
  Synthetic polypeptide
MAADGYLPDWLEDTLSEGIRQWWKLKPGPPPPKPAERHKDDSRGLVLPGYKYLGPFNGLDKGEPVNEADAAALEHDKAYDQQLQAGDNPYLRYNHADAEFQERLQGDTSFGGNLGRAVFQAKKRLLEPLGLVEEAAKTAPGKKRPVEQSPQEPDSSAGIGKSGAQPAKKRLNFGQTGDTESVPDPQPIGEPPAAPSGVGSLTMASGGGAPVADNNEGADGVGSSSGNWHCDSQWLGDRVITTSTRTWALPTYNNHLYKQISSASTGASNDNHYFGYSTPWGYFDFNRFHCHFSPRDWQRLINNNWGFRPKRLSFKLFNIQVKEVTQNEGTKTIANNLTSTIQVFTDSEYQLPYVLGSAHQGCLPPFPADVFMIPQYGYLTLNNGSQAVGRSSFYCLEYFPSQMLRTGNNFQFTYTFEDVPFHSSYAHSQSLDRLMNPLIDQYLYYLSRTQTTGGTANTQTLGFSQGGPNTMANQAKNWLPGPCYRQQRVSTTTGQNNNSNFAWTAGTKYHLNGRNSLANPGIAMATHKDDKERFFPSNGILIFGKQNAARDNADYSDVMLTSEEEIKTTNPVATEEYGIVADNLQQQNTAPQIGTVNSQGALPGMVWQNRDVYLQGPIWAKIPHTDGNFHPSPLMGGFGLKHPPPQILIKNTPVPADPPTTFNQSKLNSFITQYSTGQVSVEIEWELQKENSKRWNPEIQYTSNYYKSTSVDFAVNTEGVYSEPHPIGTRYLTRPL

SEQ ID NO: 1230 - protein, 738 aa, Artificial Sequence
  Synthetic polypeptide
MAADGYLPDWLEDNLSEGIRQWWKLKPGPPPPKPAERHKDDSRGLVLPGYKYLGPFNGLDKGEPVNAADAAALEHDKAYDQQLKAGDNPYLRYNHADAEFQERLQEDTSFGGNLGRAVFQAKKRVLEPLGLVEEGAKTAPGKKRPVEPSPQRSPDSSTGIGKKGQQPAKKRLNFGQTGDSESVPDPQPLGEPPATPAAVGPTTMASGGGAPMADNNEGADGVGNASGNWHCDSTWLGDRVITTSTRTWALPTYNNHLYKQISNGTSGGSTNDNTYFGCVTPWGYFDFNKFHCHFSPDDWQRLINNGWGFRTKRLNFKLFSMKVKKGTDNTGIKTIANNLTNTVHVFADSEYQLPYVLGSAHQGCLPPFPADVFMIPQYGYLTLNNGSQAVGRSSFYCLEYFPSQMLRTGNNFTFSYTFEDVPFHSSYAHSQSLDRLMNPLIDQYLYYLSRTQTTGGTANTQTLGFSQGGPNTMANQAKNWLPGPCYRQQRVSTTTGQNNNSNFAWTAGTKYHLNGRNSLANPGIAMATHKDDKERFFPSNGILIFGKQNAARDNADYSDVMLTSEEEIKTTNPVATEEYGIVADNLQQQNTAPQIGTVNSQGALPGMVWQNRDVYLQGPIWAKIPHTDGNFHPSPLMGGFGLKHPPPQILIKNTPVPADPPTTFNQSKLNSFITQYSTGQVSVEIEWELQKENSKRWNPEIQYTSNYYKSTSVDFAVNTEGVYSEPHPIGTRYLTRPL

SEQ ID NO: 1231 - protein, 737 aa, Artificial Sequence
  Synthetic polypeptide
MAADGYLPDWLEDTLSEGIRQWWKLKPGPPPPKPAERHKDDSRGLVLPGYKYLGPFNGLDKGEPVNAADAAALEHDKAYDQQLKAGDNPYLRYNHADAEFQERLQEDTSFGGNLGRAVFQAKKRVLEPLGLVEEGAKTAPGKKRPVEPSPQRSPDSSTGIGKKGQQPAKKRLNFGQTGDSESVPDPQPIGEPPAGPSGLGSGTMAAGGGAPMADNNEGADGVGSSSGNWHCDSTWLGDRVITTSTRTWALPTYNNHLYKQISSASTGASNDNHYFGYSTPWGYFDFNRFHCHFSPRDWQRLINNNWGFRPKRLNFKLFNIQVKEVTDNNGVKTIANNLTSTVQVFTDSEYQLPYVLGSAHQGCLPPFPADVFMIPQYGYLTLNNGSQAVGRSSFYCLEYFPSQMLRTGNNFTFSYTFEDVPFHSSYAHSQSLDRLMNPLIDQYLYYLSRTQTTGGTANTQTLGFSQGGPNTMANQAKNWLPGPCYRQQRVSTTTGQNNNSNFAWTAGTKYHLNGRNSLANPGIAMATHKDDKERFFPSNGILIFGKQNAARDNADYSDVMLTSEEEIKTTNPVATEEYGIVADNLQQQNTAPQIGTVNSQGALPGMVWQNRDVYLQGPIWAKILHTDGNFHPSPLMGGFGMKHPPPPILIKNTPVPADPPTTFNQSKLNSFITQYSTGQVSVEIEWELPKENSKRWNPEIQYTSNYYKSTSVDFAVNTEGVYYEPHPIGTRYLTPPL

SEQ ID NO: 1232 - protein, 737 aa, Artificial Sequence
  Synthetic polypeptide
MAADGYLPDWLEDNLSEGIREWWALKPGAPKPKANQQKQDDGRGLVLPGYKYLGPFNGLDKGEPVNAADAAALEHDKAYDQQLKAGDNPYLRYNHADAEFQERLQEDTSFGGNLGRAVFQAKKRVLEPLGLVEEGAKTAPGKKRPVEPSPQRSPDSSTGIGKKGQQPARKRLNFGQTGDSESVPDPQPLGEPPAAPSGVAPNTMAAGGGAPMADNNEGADGVGNASGNWHCDSTWLGDRVITTSTRTWALPTYNNHLYKQISSASTGASNDNHYFGYSTPWGYFDFNRFHCHFSPRDWQRLITTIGGFRPKRLNFKLFNIQVKEVTDNNGVKTIANNLTSTVQVFTDSEYQLPYVLGSAHQGCLPPFPADVFMIPQYGYLTLNNGSQAVGRSSFYCLEYFPSQMLRTGNNFTFSYTFEDVPFHSSYAHSQSLDRLMNPLIDQYLYYLSRTQTTGGTANTQTLGFSQGGPNTMANQAKNWLPGPCYRQQRVSTTTGQNNNSNFAWTAGTKYHLNGRNSLANPGIAMATHKDDKERFFPSNGILIFGKQNAARDNADYSDVMLTSEEEIKTTNPVATEEYGIVADNLQQQNTAPQIGTVNSQGALPGMVWQNRDVYLQGPIWAKIPHTDGNFHPSPLMGGFGLKHPPPQILIKNTPVPADPPTTFNQSKLNSFITQYSTGQVSVEIEWELQKENSKRWNPEIQYTSNYYKSTSVDFAVNTEGVYSEPHPIGTRYLTRPL

SEQ ID NO: 1233 - protein, 736 aa, Artificial Sequence
  Synthetic polypeptide
MAADGYLPDWLEDTLSEGIRQWWKLKPGPPPPKPAERHKDDGRGLVLPGYKYLGPFNGLDKGEPVNAADAAALEHDKAYDQQLKAGDNPYLRYNHADAEFQERLQEDTSFGGNLGRAVFQAKKRVLEPLGLVEEPVKTAPGKKRPVEQSPQEPDSSSGIGKKGQQPAKKRLNFGQTGDSESVPDPQPLGEPPATPAAVGPTTMASGGGAPMADNNEGADGVGNASGNWHCDSTWMGDRVITTSTRTWALPTYNNHLYKQISSASTGASNDNHYFGYSTPWGYFDFNRFHCHFSPRDWQRLINNNWGFRPKRLNFKLFNIQVKEVTQNEGTKTIANNLTSTIQVFTDSEYQLPYVLGSAHQGCLPPFPADVFMIPQYGYLTLNNGSQAVGRSSFYCLEYFPSQMLRTGNNFQFTYTFEDVPFHSSYAHSQSLDRLMNPLIDQYLYYLSRTQTTGGTANTQTLGFSQGGPNTMANHAKNWLPGPCYRQQRVSTTTGQNNNSNFAWTAGTKYHLNGRNSLANPGIAMATHKDDKERFFPSNGILIFGKQNAARDNADYSDVMLTSEEEIKTTNPVATEEYGIVADNLQQQNTAPQIGTVNSQGALPGMVWQNRDVYLQGPIWAKIPHTDGNFHPSPLMGGFGLKHPPPQILIKNTPVPADPPTTFNQSKLNSFITQYSTGQVSVEIEWELQKENSKRWNPEIQYTSNYYKSTSVDFAVNTEGVYSEPHPIGTRYLTRPL

SEQ ID NO: 1234 - protein, 737 aa, Artificial Sequence
  Synthetic polypeptide
MAADGYLPDWLEDNLSQGIREWWDLKPGAPKPKANQQKQDDGRGLVLPGYKYLGPFNGLDKGEPVNAADAAALEHDKAYDQQLKAGDNPYLRYNHADAEFQERLQEDTSFGGNLGRAVFQAKKRVLEPLGLVEEGAKTAPGKKRPVEPSPQRSPDSSTGIGKKGQQPARKRLNFGQTGDSESVPDPQPLGEPPAAPAAVGPTTMASGGGAPMADNNEGADGVGSSSGNWHCDSQWLGDRVITTSTRTWALPTYNNHLYKQISSASTGASNDNHYFGYSTPWGYFDFNRFHCHFSPRDWQRLINNNWGFRPKRLSFKLFNIQVKEVTQNEGTKTIANNLTSTIQVFTDSEYQLPYVLGSAHQGCLPPFPADVFMIPQYGYLTLNNGSQAVGRSSFYCLEYFPSQMLRTGNNFQFTYTFEDVPFHSSYAHSQSLDRLMNPLIDQYLYYLSRTQTTGGTTNAQTLGFSQGGPNTMANQAKNWLPGPCYRQQRVSTTTGQNNNSNFAWTAGTKYHLNGRNSLANPGIAMATHKDDKERFFPSNGILIFGKQNAARDNADYSDVMLTSEEEIKTTNPVATEEYGIVADNLQQQNTAPQIGTVNSQGALPGMVWQNRDVYLQGPIWAKIPHTDGNFHPSPLMGGFGLKHPPPQILIKNTPVPADPPTTFNQSKLNSFITQYSTGQVSVEIEWELQKENSKRWNPEIQYTSNYYKSTNVDFAVNTEGVYSEPHPIGTRYLTRPL

SEQ ID NO: 1235 - protein, 736 aa, Artificial Sequence
  Synthetic polypeptide
MAADGYLPDWLEDNLSEGIREWWDLKPGAPKPKANQQKQDDGRGLVLPGYKYLGPFNGLDKGEPVNAADAAALEHDKAYDQQLKAGDNPYLRYNHADAEFQERLQEDTSFGGNLGRAVFQAKKRVLEPFGLVEEGAKTAPGKKRPVEQSPQEPDSSSGIGKTGQQPAKKRLNFGQTGDTESVPDPQPIGEPPAAPSGVGPNTMAAGGGAPMADNNEGADGVGSSSGNWHCDSTWMGDRVITTSTRTWALPTYNNHLYKQISSASTGASNDNHYFGYSTPWGYFDFNRFHCHFSPRDWQRLINNNWGFRPKRLNFKLFNIQVKEVTQNEGTKTIANNLTSTIQVFTDSEYQLPYVLGSAHQGCLPPFPADVFMIPQYGYLTLNNGSQAVGRSSFYCLEYFPSQMLRTGNNFQFTYTFEDVPFHSSYAHSQSLDRLMNPLIDQYLYYLSRTQTTGGTANTQTLGFSQGGPNTMANQAKNWLPGPCYRQQRVSTTTGQNNNSNFAWTAGTKYHLNGRNSLANPGIAMATHKDDKERFFPSNGILIFGKQNAARDNADYSDVMLTSEEEIKTTNPVATEEYGIVADNLQQQNTAPQIGTVNSQGALPGMVWQNRDVYLQGPIWAKIPHTDGNFHPSPLMGGFGLKHPPPQILIKNTPVPADPPTTFNQSKLNSFITQYSTGQVSVEIEWELQKENSKRWNPEIQYTSNYYKSTNVDFAVNTEGVYSEPHPIGTRYFTRPL

SEQ ID NO: 1236 - protein, 736 aa, Artificial Sequence
  Synthetic polypeptide
MAADGYLPDWLEDNLSEGIREWWDLKPGAPKPKANQQKQDDGRGLVLPGYKYLGPFNGLDKGEPVNAADAAALEHDKAYDQQLKAGDNPYLRYNHADAEFQERLQEDTSFGGNLGRAVFQAKKRVLEPLGLVEEGAKTAPGKKRPVEQSPQEPDSSSGIGKTGQQPAKKRLNFGQTGDSESVPDPQPLGEPPATPAAVGPTTMASGGGAPMADNNEGADGVGNSSGNWHCDSTWMGDRVITTSTRTWALPTYNNHLYKQISSASTGASNDNHYFGYSTPWGYFDFNRFHCHFSPRDWQRLINNNWGFRPKRLNFKLFNIQVKEVTDNNGVKTIANNLTSTVQVFTDSEYQLPYVLGSAHQGCLPPFPADVFMIPQYGYLTLNNGSQAVGRSSFYCLEYFPSQMLRTGNNFQFTYTFEDVPFHSSYAHSQSLDRLMNPLIDQYLYYLSRTQTTGGTANTQTLGFSQGGPNTMANQAKNWLPGPCYRQQRVSTTTGQNNNSNFAWTAGTKYHLNGRNSLANPGIAMATHKDDKERFFPSNGILIFGKQNAARDNADYSDVMLTSEEEIKTTNPVATEEYGIVADNLQQQNTAPQIGTVNSQGALPGMVWQNRDVYLQGPIWAKIPHTDGNFHPSPLMGGFGLKHPPPQILIKNTPVPADPPTTFNQSKLNSFITQYSTGQVSVEIEWELQKENSKRWNPEIQYTSNYYKSTNVDFAVNTEGVYSEPHPIGTRYLTRPL

SEQ ID NO: 1237 - protein, 736 aa, Artificial Sequence
  Synthetic polypeptide
MAADGYLPDWLEDNLSEGIREWWDLKPGAPKPKANQQKQDDGRGLVLPGYKYLGPFNGLDKGEPVNAADAAALEHDKAYDQQLKAGDNPYLRYNHADAEFQERLQEDTSFGGNLGRAVFQAKKRVLEPLGLVEEGAKTAPGKKRPVEQSPQEPDSSSGIGKTGQQPAKKRLNFGQTGDSESVPDPQPLGEPPATPAAVGPTTMASGGGAPMADNNEGADGVGNASGNWHCDSTWLGDRVITTSTRTWALPTYNNHLYKQISSASTGASNDNHYFGYSTPWGYFDFNRFHCHFSPRDWQRLINNNWGFRPKRLNFKLFNIQVKEVTQNEGTKTIANNLTSTIQVFTDSEYQLPYVLGSAHQGCLPPFPADVFMIPQYGYLTLNNGSQAVGRSSFYCLEYFPSQMLRTGNNFEFSYQFEDVPFHSSYAHSQSLDRLMNPLIDQYLYYLSRTQTTGGTANTQTLGFSQGGPNTMANQAKNWLPGPCYRQQRVSTTTGQNNNSNFAWTAGTKYHMNGRNSLVNPGIAMATHKDDKERFFPSNGILIFGKQNVARDNADYSDVMLTSEEEIKTTNPVATEEYGIVADNLQQQNTAPQIGTVNSQGALPGMVWQNRDVYLQGPIWAKIPHTDGNFHPSPLMGGFGLKHPPPQILIKNTPVPADPPTTFNQSKLNSFITQYSTGQVSVEIEWELQKENSKRWNPEIQYTSNYYKSTSVDFAVNTEGVYSEPHPIGTRYLTRPL

SEQ ID NO: 1238 - DNA, 2217 bp, Artificial Sequence
  Synthetic polynucleotide
atggctgccgatggttatcttccagattggctcgaggacaacctctctgagggcattcgcgagtggtgggcgctgaaacctggagccccgaagcccaaagccaaccagcaaaagcaggacgacggccggggtctggtgcttcctggctacaagtacctcggacccttcaacggactcgacaagggggagcccgtcaacgcggcggacgcagcggccctcgagcacgacaaggcctacgaccagcagctgcaggcgggtgacaatccgtacctgcggtataaccacgccgacgccgagtttcaggagcgtctgcaagaagatacgtcttttgggggcaacctcgggcgagcagtcttccaggccaagaagcgggttctcgaacctctcggtctggttgaggaaggcgctaagacggctcctggaaagaagagaccggtagagccatcaccccagcgttctccagactcctctacgggcatcggcaagaaaggccaacagcccgccagaaaaagactcaattttggtcagactggcgactcagagtcagttccagaccctcaacctctcggagaacctccagcagcgccctctggtgtgggacctaatacaatggctgcaggcggtggcgcaccaatggcagacaataacgaaggcgccgacggagtgggtagttcctcgggaaattggcattgcgattccacatggctgggcgacagagtcatcaccaccagcacccgaacctgggccctgcccacctacaacaaccacctctacaagcaaatctccaacgggacatcgggaggagccaccaacgacaacacctacttcggctacagcaccccctgggggtattttgactttaacagattccactgccacttttcaccacgtgactggcagcgactcatcaacaacaactggggattccggcccaagagactcagcttcaagctcttcaacatccaggtcaaggaggtcacgcagaatgaaggcaccaagaccatcgccaataacctcaccagcaccatccaggtgtttacggactcggagtaccagctgccgtacgttctcggctctgcccaccagggctgcctgcctccgttcccggcggacgtgttcatgattccccagtacggctacctaacactcaacaacggtagtcaggccgtgggacgctcctccttctactgcctggaatactttccttcgcagatgctgagaaccggcaacaacttccagtttacttacaccttcgaggacgtgcctttccacagcagctacgcccacagccagagcttggaccggctgatgaatcctctgattgaccagtacctgtactacttgtctcggactcaaacaacaggaggcacggcaaatacgcagactctgggcttcagccaaggtgggcctaatacaatggccaatcaggcaaagaactggctgccaggaccctgttaccgccaacaacgcgtctcaacgacaaccgggcaaaacaacaatagcaactttgcctggactgctgggaccaaataccatctgaatggaagaaattcattggctaatcctggcatcgctatggcaacacacaaagacgacgaggagcgtttttttcccagtaacgggatcctgatttttggcaaacaaaatgctgccagagacaatgcggattacagcgatgtcatgctcaccagcgaggaagaaatcaaaaccactaaccctgtggctacagaggaatacggtatcgtggcagataacttgcagcagcaaaacacggctcctcaaattggaactgtcaacagccagggggccttacccggtatggtttggcagaaccgggacgtgtacctgcagggtcccatctgggccaagattcctcacacggacggcaacttccacccgtctccgctgatgggcggctttggcctgaaacatcctccgcctcagatcctgatcaagaacacgcctgtacctgcggatcctccgaccaccttcaaccagtcaaagctgaactctttcatcacgcaatacagcaccggacaggtcagcgtggaaattgaatgggagctgcagaaggaaaacagcaagcgctggaaccccgagatccagtacacctccaactactacaaatctacaagtgtggactttgctgttaatacagaaggcgtgtactctgaaccccgccccattggcacccgttacctcacccgtaatctgtaa

SEQ ID NO: 1239 - protein, 738 aa, Artificial Sequence; identical to SEQ ID NO: 110
  Synthetic polypeptide

SEQ ID NO: 1240 - protein, 735 aa, Artificial Sequence
  Synthetic polypeptide
MAADGYLPDWLEDNLSEGVREWWALQPGAPKPKANQQHQDNARGLVLPGYKYLGPGNGLDKGEPVNAADAAALEHDKAYDQQLKAGDNPYLKYNHADAEFQQRLQGDTSFGGNLGRAVFQAKKRVLEPLGLVEQAGETAPGKKRPLIESPQQPDSSTGIGKKGKQPAKKKLVFEDETGAGDGPPEGSTSGAMSDDSEMRAAAGGAAVEGGQGADGVGNASGDWHCDSTWSEGHVTTTSTRTWVLPTYNNHLYKRLGESLQSNTYNGFSTPWGYFDFNRFHCHFSPRDWQRLINNNWGMRPKAMRVKIFNIQVKEVTTSNGETTVANNLTSTVQIFADSSYELPYVMDAGQEGSLPPFPNDVFMVPQYGYCGLVTGNTSQQQTDRNAFYCLEYFPSQMLRTGNNFEITYSFEKVPFHSMYAHSQSLDRLMNPLIDQYLWGLQSTTTGTTLNAGTATTNFTKLRPTNFSNFKKNWLPGPSIKQQGFSKTANQNYKIPATGSDSLIKYETHSTLDGRWSALTPGPPMATAGPADSKFSNSQLIFAGPKQNGNTATVPGTLIFTSEEELAATNATDTDMWGNLPGGDQSNSNLPTVDRLTALGAVPGMVWQNRDIYYQGPIWAKIPHTDGHFHPSPLIGGFGLKHPPPQIFIKNTPVPANPATTFSSTPVNSFITQYSTGQVSVQIDWEIQKERSKRWNPEVQFTSNYGQQNSLLWAPDAAGKYTEPRAIGTRYLTHHL

SEQ ID NO: 1241 - protein, 735 aa, Artificial Sequence
  Synthetic polypeptide
MAADGYLPDWLEDNLSEGVREWWALQPGAPKPKANQQHQDNARGLVLPGYKYLGPGNGLDKGEPVNAADAAALEHDKAYDQQLKAGDNPYLKYNHADAEFQQRLQGDTSFGGNLGRAVFQAKKRVLEPLGLVEQAGETAPGKKRPLIESPQQPDSSTGIGKKGKQPAKKKLVFEDETGAGDGPPEGSTSGAMSDDSEMRAAAGGAAVEGGQGADGVGNASGDWHCDSTWSEGHVTTTSTRTWVLPTYNNHLYKRLGESLQSNTYNGFSTPWGYFDFNRFHCHFSPRDWQRLINNNWGMRPKAMRVKIFNIQVKEVTTSNGETTVANNLTSTVQIFADSSYELPYVMDAGQEGSLPPFPNDVFMVPQYGYCGLVTGNTSQQQTDRNAFYCLEYFPSQMLRTGNNFEITYSFEKVPFHSMYAHSQSLDRLMNPLIDQYLWGLQSTTTGTTLNAGTATTNFTKLRPTNFSNFKKNWLPGPSIKQQGFSKTANQNYLIPATGSDSLIRYETHSTLDGRWSALTPGPPMATAGPADSKFSNSQLIFAGPKQNGNTATVPGTLIFTSEEELAATNATDTDMWGNLPFRDLSSSNLPTVDRSTPLGAVPGMVWQNRDIYYQGPIWAKIPHTDGHFHPSPLIGGFGLKHPPPQIFIKNTPVPANPATTFSSTPVNSFITQYSTGQVSVQIDWEIQKERSKRWNPEVQFTSNYGQQNSLLWAPDAAGKYTEPRAIGTRYLTHHL

SEQ ID NO: 1242 - protein, 735 aa, Artificial Sequence
  Synthetic polypeptide
MAADGYLPDWLEDNLSEGVREWWALQPGAPKPKANQQHQDNARGLVLPGYKYLGPGNGLDKGEPVNAADAAALEHDKAYDQQLKAGDNPYLKYNHADAEFQQRLQGDTSFGGNLGRAVFQAKKRVLEPLGLVEQAGETAPGKKRPLIESPQQPDSSTGIGKKGKQPAKKKLVFEDETGAGDGPPEGSTSGAMSDDSEMRAAAGGAAVEGGQGADGVGNASGDWHCDSTWSEGHVTTTSTRTWVLPTYNNHLYKRLGESLQSNTYNGFSTPWGYFDFNRFHCHFSPRDWQRLINNNWGMRPKAMRVKIFNIQVKEVTTSNGETTVANNLTSTVQIFADSSYELPYVMDAGQEGSLPPFPNDVFMVPQYGYCGLVTGNTSQQQTDRNAFYCLEYFPSQMLRTGNNFEITYSFEKVPFHSMYAHSQSLDRLMNPLIDQYLWGLQSTTTGTTLNAGTATTNFTKLRPTNFSNFKKNWLPGPSIKQQGFSKTANQNYYIPATGSDSLILYETHSTLDGRWSALTPGPPMATAGPADSKFSNSQLIFAGPKQNGNTATVPGTLIFTSEEELAATNATDTDMWGNLPGGDQSNSNLPTVDRLTALGAVPGMVWQNRDIYYQGPIWAKIPHTDGHFHPSPLIGGFGLKHPPPQIFIKNTPVPANPATTFSSTPVNSFITQYSTGQVSVQIDWEIQKERSKRWNPEVQFTSNYGQQNSLLWAPDAAGKYTEPRAIGTRYLTHHL

SEQ ID NO: 1243 - protein, 735 aa, Artificial Sequence
  Synthetic polypeptide
MAADGYLPDWLEDNLSEGVREWWALQPGAPKPKANQQHQDNARGLVLPGYKYLGPGNGLDKGEPVNAADAAALEHDKAYDQQLKAGDNPYLKYNHADAEFQQRLQGDTSFGGNLGRAVFQAKKRVLEPLGLVEQAGETAPGKKRPLIESPQQPDSSTGIGKKGKQPAKKKLVFEDETGAGDGPPEGSTSGAMSDDSEMRAAAGGAAVEGGQGADGVGNASGDWHCDSTWSEGHVTTTSTRTWVLPTYNNHLYKRLGESLQSNTYNGFSTPWGYFDFNRFHCHFSPRDWQRLINNNWGMRPKAMRVKIFNIQVKEVTTSNGETTVANNLTSTVQIFADSSYELPYVMDAGQEGSLPPFPNDVFMVPQYGYCGLVTGNTSQQQTDRNAFYCLEYFPSQMLRTGNNFEITYSFEKVPFHSMYAHSQSLDRLMNPLIDQYLWGLQSTTTGTTLNAGTATTNFTKLRPTNFSNFKKNWLPGPSIKQQGFSKTANQNYGIPATGSDSLIKYETHSTLDGRWSALTPGPPIATAGPADSKFSNSQLIFAGPKQNGNTATVPGTLIFTSEEELAATNATDTDMWGNLPLYDASSSNLPTVDRLTLLGAVPGMVWQNRDIYYQGPIWAKIPHTDGHFHPSPLIGGFGLKHPPPQIFIKNTPVPANPATTFSSTPVNSFITQYSTGQVSVQIDWEIQKERSKRWNPEVQFTSNYGQQNSLLWAPDAAGKYTEPRAIGTRYLTHHL

SEQ ID NO: 1244 - protein, 735 aa, Artificial Sequence
  Synthetic polypeptide
MAADGYLPDWLEDNLSEGVREWWALQPGAPKPKANQQHQDNARGLVLPGYKYLGPGNGLDKGEPVNAADAAALEHDKAYDQQLKAGDNPYLKYNHADAEFQQRLQGDTSFGGNLGRAVFQAKKRVLEPLGLVEQAGETAPGKKRPLIESPQQPDSSTGIGKKGKQPAKKKLVFEDETGAGDGPPEGSTSGAMSDDSEMRAAAGGAAVEGGQGADGVGNASGDWHCDSTWSEGHVTTTSTRTWVLPTYNNHLYKRLGESLQSNTYNGFSTPWGYFDFNRFHCHFSPRDWQRLINNNWGMRPKAMRVKIFNIQVKEVTTSNGETTVANNLTSTVQIFADSSYELPYVMDAGQEGSLPPFPNDVFMVPQYGYCGLVTGNTSQQQTDRNAFYCLEYFPSQMLRTGNNFEITYSFEKVPFHSMYAHSQSLDRLMNPLIDQYLWGLQSTTTGTTLNAGTATTNFTKLRPTNFSNFKKNWLPGPSIKQQGFSKTANQNYTIPATGSDSLITYETHSTLDGRWSALTPGPPGATAGPADSKFSNSQLIFAGPKQNGNTATVPGTLIFTSEEELAATNATDTDMWGNLPRVDTSASNLPTVDRYTNLGAVPGMVWQNRDIYYQGPIWAKIPHTDGHFHPSPLIGGFGLKHPPPQIFIKNTPVPANPATTFSSTPVNSFITQYSTGQVSVQIDWEIQKERSKRWNPEVQFTSNYGQQNSLLWAPDAAGKYTEPRAIGTRYLTHHL

SEQ ID NO: 1245 - protein, 735 aa, Artificial Sequence
  Synthetic polypeptide
MAADGYLPDWLEDNLSEGVREWWALQPGAPKPKANQQHQDNARGLVLPGYKYLGPGNGLDKGEPVNAADAAALEHDKAYDQQLKAGDNPYLKYNHADAEFQQRLQGDTSFGGNLGRAVFQAKKRVLEPLGLVEQAGETAPGKKRPLIESPQQPDSSTGIGKKGKQPAKKKLVFEDETGAGDGPPEGSTSGAMSDDSEMRAAAGGAAVEGGQGADGVGNASGDWHCDSTWSEGHVTTTSTRTWVLPTYNNHLYKRLGESLQSNTYNGFSTPWGYFDFNRFHCHFSPRDWQRLINNNWGMRPKAMRVKIFNIQVKEVTTSNGETTVANNLTSTVQIFADSSYELPYVMDAGQEGSLPPFPNDVFMVPQYGYCGLVTGNTSQQQTDRNAFYCLEYFPSQMLRTGNNFEITYSFEKVPFHSMYAHSQSLDRLMNPLIDQYLWGLQSTTTGTTLNAGTATTNFTKLRPTNFSNFKKNWLPGPSIKQQGFSKTANQNYSIPATGSDSLIKYETHSTLDGRWSALTPGPPFATAGPADSKFSNSQLIFAGPKQNGNTATVPGTLIFTSEEELAATNATDTDMWGNLPDYDSSLSNLPTVDRDTTLGAVPGMVWQNRDIYYQGPIWAKIPHTDGHFHPSPLIGGFGLKHPPPQIFIKNTPVPANPATTFSSTPVNSFITQYSTGQVSVQIDWEIQKERSKRWNPEVQFTSNYGQQNSLLWAPDAAGKYTEPRAIGTRYLTHHL

SEQ ID NO: 1246 - protein, 735 aa, Artificial Sequence
  Synthetic polypeptide
MAADGYLPDWLEDNLSEGVREWWALQPGAPKPKANQQHQDNARGLVLPGYKYLGPGNGLDKGEPVNAADAAALEHDKAYDQQLKAGDNPYLKYNHADAEFQQRLQGDTSFGGNLGRAVFQAKKRVLEPLGLVEQAGETAPGKKRPLIESPQQPDSSTGIGKKGKQPAKKKLVFEDETGAGDGPPEGSTSGAMSDDSEMRAAAGGAAVEGGQGADGVGNASGDWHCDSTWSEGHVTTTSTRTWVLPTYNNHLYKRLGESLQSNTYNGFSTPWGYFDFNRFHCHFSPRDWQRLINNNWGMRPKAMRVKIFNIQVKEVTTSNGETTVANNLTSTVQIFADSSYELPYVMDAGQEGSLPPFPNDVFMVPQYGYCGLVTGNTSQQQTDRNAFYCLEYFPSQMLRTGNNFEITYSFEKVPFHSMYAHSQSLDRLMNPLIDQYLWGLQSTTTGTTLNAGTATTNFTKLRPTNFSNFKKNWLPGPSIKQQGFSKTANQNYSIPATGSDSLIWYETHSTLDGRWSALTPGPPCATAGPADSKFSNSQLIFAGPKQNGNTATVPGTLIFTSEEELAATNATDTDMWGNLPQGDSSLSNLPTVDRMTVLGAVPGMVWQNRDIYYQGPIWAKIPHTDGHFHPSPLIGGFGLKHPPPQIFIKNTPVPANPATTFSSTPVNSFITQYSTGQVSVQIDWEIQKERSKRWNPEVQFTSNYGQQNSLLWAPDAAGKYTEPRAIGTRYLTHHL

SEQ ID NO: 1247 - protein, 735 aa, Artificial Sequence
  Synthetic polypeptide
MAADGYLPDWLEDNLSEGVREWWALQPGAPKPKANQQHQDNARGLVLPGYKYLGPGNGLDKGEPVNAADAAALEHDKAYDQQLKAGDNPYLKYNHADAEFQQRLQGDTSFGGNLGRAVFQAKKRVLEPLGLVEQAGETAPGKKRPLIESPQQPDSSTGIGKKGKQPAKKKLVFEDETGAGDGPPEGSTSGAMSDDSEMRAAAGGAAVEGGQGADGVGNASGDWHCDSTWSEGHVTTTSTRTWVLPTYNNHLYKRLGESLQSNTYNGFSTPWGYFDFNRFHCHFSPRDWQRLINNNWGMRPKAMRVKIFNIQVKEVTTSNGETTVANNLTSTVQIFADSSYELPYVMDAGQEGSLPPFPNDVFMVPQYGYCGLVTGNTSQQQTDRNAFYCLEYFPSQMLRTGNNFEITYSFEKVPFHSMYAHSQSLDRLMNPLIDQYLWGLQSTTTGTTLNAGTATTNFTKLRPTNFSNFKKNWLPGPSIKQQGFSKTANQNYCIPATGSDSLIRYETHSTLDGRWSALTPGPPLATAGPADSKFSNSQLIFAGPKQNGNTATVPGTLIFTSEEELAATNATDTDMWGNLPYKDSSRSNLPTVDRETSLGAVPGMVWQNRDIYYQGPIWAKIPHTDGHFHPSPLIGGFGLKHPPPQIFIKNTPVPANPATTFSSTPVNSFITQYSTGQVSVQIDWEIQKERSKRWNPEVQFTSNYGQQNSLLWAPDAAGKYTEPRAIGTRYLTHHL

SEQ ID NO: 1248 - protein, 735 aa, Artificial Sequence
  Synthetic polypeptide
MAADGYLPDWLEDNLSEGVREWWALQPGAPKPKANQQHQDNARGLVLPGYKYLGPGNGLDKGEPVNAADAAALEHDKAYDQQLKAGDNPYLKYNHADAEFQQRLQGDTSFGGNLGRAVFQAKKRVLEPLGLVEQAGETAPGKKRPLIESPQQPDSSTGIGKKGKQPAKKKLVFEDETGAGDGPPEGSTSGAMSDDSEMRAAAGGAAVEGGQGADGVGNASGDWHCDSTWSEGHVTTTSTRTWVLPTYNNHLYKRLGESLQSNTYNGFSTPWGYFDFNRFHCHFSPRDWQRLINNNWGMRPKAMRVKIFNIQVKEVTTSNGETTVANNLTSTVQIFADSSYELPYVMDAGQEGSLPPFPNDVFMVPQYGYCGLVTGNTSQQQTDRNAFYCLEYFPSQMLRTGNNFEITYSFEKVPFHSMYAHSQSLDRLMNPLIDQYLWGLQSTTTGTTLNAGTATTNFTKLRPTNFSNFKKNWLPGPSIKQQGFSKTANQNYIIPATGSDSLIYYETHSTLDGRWSALTPGPPRATAGPADSKFSNSQLIFAGPKQNGNTATVPGTLIFTSEEELAATNATDTDMWGNLPWIDNSRSNLPTVDRPTSLGAVPGMVWQNKNIYYQGPIWAKIPHTDGHFHPSPLIGGFGLKHPPPQIFIKNTPVPANPATTFTSTPVNSFITQYSTGQVSVQIDWEIQKERSKRWNPEVQFTSNYGQQNSLLWAPDAAGKYTEPRAIGTRYLTHHL

SEQ ID NO: 1249 - protein, 735 aa, Artificial Sequence
  Synthetic polypeptide
MAADGYLPDWLEDNLSEGVREWWALQPGAPKPKANQQHQDNARGLVLPGYKYLGPGNGLDKGEPVNAADAAALEHDKAYDQQLKAGDNPYLKYNHADAEFQQRLQGDTSFGGNLGRAVFQAKKRVLEPLGLVEQAGETAPGKKRPLIESPQQPDSSTGIGKKGKQPAKKKLVFEDETGAGDGPPEGSTSGAMSDDSEMRAAAGGAAVEGGQGADGVGNASGDWHCDSTWSEGHVTTTSTRTWVLPTYNNHLYKRLGESLQSNTYNGFSTPWGYFDFNRFHCHFSPRDWQRLINNNWGMRPKAMRVKIFNIQVKEVTTSNGETTVANNLTSTVQIFADSSYELPYVMDAGQEGSLPPFPNDVFMVPQYGYCGLVTGNTSQQQTDRNAFYCLEYFPSQMLRTGNNFEITYSFEKVPFHSMYAHSQSLDRLMNPLIDQYLWGLQSTTTGTTLNAGTATTNFTKLRPTNFSNFKKNWLPGPSIKQQGFSKTANQNYGIPATGSDSLIIYETHSTLDGRWSALTPGPPRATAGPADSKFSNSQLIFAGPKQNGNTATVPGTLIFTSEEELAATNATDTDMWGNLPGGDQSNSNLPTVDRLTALGAVPGMVWQNRDIYYQGPIWAKIPHTDGHFHPSPLIGGFGLKHPPPQIFIKNTPVPANPATTFSSTPVNSFITQYSTGQVSVQIDWEIQKERSKRWNPEVQFTSNYGQQNSLLWAPDAAGKYTEPRAIGTRYLTHHL

SEQ ID NO: 1250 - protein, 735 aa, Artificial Sequence
  Synthetic polypeptide
MAADGYLPDWLEDNLSEGVREWWALQPGAPKPKANQQHQDNARGLVLPGYKYLGPGNGLDKGEPVNAADAAALEHDKAYDQQLKAGDNPYLKYNHADAEFQQRLQGDTSFGGNLGRAVFQAKKRVLEPLGLVEQAGETAPGKKRPLIESPQQPDSSTGIGKKGKQPAKKKLVFEDETGAGDGPPEGSTSGAMSDDSEMRAAAGGAAVEGGQGADGVGNASGDWHCDSTWSEGHVTTTSTRTWVLPTYNNHLYKRLGESLQSNTYNGFSTPWGYFDFNRFHCHFSPRDWQRLINNNWGMRPKAMRVKIFNIQVKEVTTSNGETTVANNLTSTVQIFADSSYELPYVMDAGQEGSLPPFPNDVFMVPQYGYCGLVTGNTSQQQTDRNAFYCLEYFPSQMLRTGNNFEITYSFEKVPFHSMYAHSQSLDRLMNPLIDQYLWGLQSTTTGTTLNAGTATTNFTKLRPTNFSNFKKNWLPGPSIKQQGFSKTANQNYVIPATESDSLIYYETHSTLDGRWSALTPGPPYATAGPADSKFSNSQLIFAGPKQNGNTATVPGTLIFTSEEELAATNATDTDMWGNLPPRDDSTSNLPTVDRKTYLGAVPGMVWQNRDIYYQGPIWAKIPHTDGHFHPSPLIGGFGLKHPPPQIFIKNTPVPANPATTFSSTPVNSFITQYSTGQVSVQIDWEIQKERSKRWNPEVQFTSNYGQQNSLLWAPDAAGKYTEPRAIGTRYLTHHL

SEQ ID NO: 1251 - protein, 735 aa, Artificial Sequence
  Synthetic polypeptide
MAADGYLPDWLEDNLSEGVREWWALQPGAPKPKANQQHQDNARGLVLPGYKYLGPGNGLDKGEPVNAADAAALEHDKAYDQQLKAGDNPYLKYNHADAEFQQRLQGDTSFGGNLGRAVFQAKKRVLEPLGLVEQAGETAPGKKRPLIESPQQPDSSTGIGKKGKQPAKKKLVFEDETGAGDGPPEGSTSGAMSDDSEMRAAAGGAAVEGGQGADGVGNASGDWHCDSTWSEGHVTTTSTRTWVLPTYNNHLYKRLGESLQSNTYNGFSTPWGYFDFNRFHCHFSPRDWQRLINNNWGMRPKAMRVKIFNIQVKEVTTSNGETTVANNLTSTVQIFADSSYELPYVMDAGQEGSLPPFPNDVFMVPQYGYCGLVTGNTSQQQTDRNAFYCLEYFPSQMLRTGNNFEITYSFEKVPFHSMYAHSQSLDRLMNPLIDQYLWGLQSTTTGTTLNAGTATTNFTKLRPTNFSNFKKNWLPGPSIKQQGFSKTANQNYYIPATGSDSLIIYETHSTLDGRWSALTPGPPIATAGPADSKFSNSQLIFAGPKQNGNTATVPGTLIFTSEEELAATNSTDTDMWGNLPTDDDSRSNLPTVDRMTLLGAVPGMVWQNRDIYYQGPIWAKIPHTDGHFHPSPLIGGFGLKHPPPQIFIKNTPVPANPATTFSSTPVNSFITQYSTGQVSVQIDWEIQKERSKRWNPEVQFTSNYGQQNSLLWAPDAAGKYTEPRAIGTRYLTHHL

SEQ ID NO: 1252 - protein, 735 aa, Artificial Sequence
  Synthetic polypeptide
MAADGYLPDWLEDNLSEGVREWWALQPGAPKPKANQQHQDNARGLVLPGYKYLGPGNGLDKGEPVNAADAAALEHDKAYDQQLKAGDNPYLKYNHADAEFQQRLQGDTSFGGNLGRAVFQAKKRVLEPLGLVEQAGETAPGKKRPLIESPQQPDSSTGIGKKGKQPAKKKLVFEDETGAGDGPPEGSTSGAMSDDSEMRAAAGGAAVEGGQGADGVGNASGDWHCDSTWSEGHVTTTSTRTWVLPTYNNHLYKRLGESLQSNTYNGFSTPWGYFDFNRFHCHFSPRDWQRLINNNWGMRPKAMRVKIFNIQVKEVTTSNGETTVANNLTSTVQIFADSSYELPYVMDAGQEGSLPPFPNDVFMVPQYGYCGLVTGNTSQQQTDRNAFYCLEYFPSQMLRTGNNFEITYSFEKVPFHSMYAHSQSLDRLMNPLIDQYLWGLQSTTTGTTLNAGTATTNFTKLRPTNFSNFKKNWLPGPSIKQQGFSKTANQNYHIPATGSDSLIYYETHSTLDGRWSALTPGPPSATAGPADSKFSNSQLIFAGPKQNGNTATVPGTLIFTSEEELAATNATDTDMWGNLPRRDSSVSNLPTVDRYTDLGAVPGMVWQNRDIYYQGPIWAKIPHTDGHFHPSPLIGGFGLKHPPPQIFIKNTPVPANPATTFSSTPVNSFITQYSTGQVSVQIDWEIQKERSKRWNPEVQFTSNYGQQNSLLWAPDAAGKYTEPRAIGTRYLTHHL

SEQ ID NO: 1253 - protein, 735 aa, Artificial Sequence
  Synthetic polypeptide
MAADGYLPDWLEDNLSEGVREWWALQPGAPKPKANQQHQDNARGLVLPGYKYLGPGNGLDKGEPVNAADAAALEHDKAYDQQLKAGDNPYLKYNHADAEFQQRLQGDTSFGGNLGRAVFQAKKRVLEPLGLVEQAGETAPGKKRPLIESPQQPDSSTGIGKKGKQPAKKKLVFEDETGAGDGPPEGSTSGAMSDDSEMRAAAGGAAVEGGQGADGVGNASGDWHCDSTWSEGHVTTTSTRTWVLPTYNNHLYKRLGESLQSNTYNGFSTPWGYFDFNRFHCHFSPRDWQRLINNNWGMRPKAMRVKIFNIQVKEVTTSNGETTVANNLTSTVQIFADSSYELPYVMDAGQEGSLPPFPNDVFMVPQYGYCGLVTGNTSQQQTDRNAFYCLEYFPSQMLRTGNNFEITYSFEKVPFHSMYAHSQSLDRLMNPLIDQYLWGLQSTTTGTTLNAGTATTNFTKLRPTNFSNFKKNWLPGPSIKQQGFSKTANQNYSIPATGSDSLISYETHSTLDGRWSALTPGPPRATAGPADSKFSNSQLIFAGPKQNGNTATVPGTLIFTSEEELAATNATDTDMWGNLPRHDSSLSNLPTVDRNTGLGAVPGMVWQNRDIYYQGPIWAKIPHTDGHFHPSPLIGGFGLKHPPPQIFIKNTPVPANPATTFSSTPVNSFITQYSTGQVSVQIDWEIQKERSKRWNPEVQFTSNYGQQNSLLWAPDAAGKYTEPRAIGTRYLTHHL

SEQ ID NO: 1254 - protein, 735 aa, Artificial Sequence
  Synthetic polypeptide
MAADGYLPDWLEDNLSEGVREWWALQPGAPKPKANQQHQDNARGLVLPGYKYLGPGNGLDKGEPVNAADAAALEHDKAYDQQLKAGDNPYLKYNHADAEFQQRLQGDTSFGGNLGRAVFQAKKRVLEPLGLVEQAGETAPGKKRPLIESPQQPDSSTGIGKKGKQPAKKKLVFEDETGAGDGPPEGSTSGAMSDDSEMRAAAGGAAVEGGQGADGVGNASGDWHCDSTWSEGHVTTTSTRTWVLPTYNNHLYKRLGESLQSNTYNGFSTPWGYFDFNRFHCHFSPRDWQRLINNNWGMRPKAMRVKIFNIQVKEVTTSNGETTVANNLTSTVQIFADSSYELPYVMDAGQEGSLPPFPNDVFMVPQYGYCGLVTGNTSQQQTDRNAFYCLEYFPSQMLRTGNNFEITYSFEKVPFHSMYAHSQSLDRLMNPLIDQYLWGLQSTTTGTTLNAGTATTNFTKLRPTNFSNFKKNWLPGPSIKQQGFSKTANQNYFIPATGSDSLIRYETHSTLDGRWSALTPGPPLATAGPADSKFSNSQLIFAGPKQNGNTATVPGTLIFTSEEELAATNATDTDMWGNLPVIDFSKSNLPTVDRLTHLGAVPGMVWQNRDIYYQGPIWAKIPHTDGHFHPSPLIGGFGLKHPPPQIFIKNTPVPANPATTFSSTPVNSFITQYSTGQVSVQIDWEIQKERSKRWNPEVQFTSNYGQQNSLLWAPDAAGKYTEPRAIGTRYLTHHL

SEQ ID NO: 1255 - protein, 735 aa, Artificial Sequence
  Synthetic polypeptide
MAADGYLPDWLEDNLSEGVREWWALQPGAPKPKANQQHQDNARGLVLPGYKYLGPGNGLDKGEPVNAADAAALEHDKAYDQQLKAGDNPYLKYNHADAEFQQRLQGDTSFGGNLGRAVFQAKKRVLEPLGLVEQAGETAPGKKRPLIESPQQPDSSTGIGKKGKQPAKKKLVFEDETGAGDGPPEGSTSGAMSDDSEMRAAAGGAAVEGGQGADGVGNASGDWHCDSTWSEGHVTTTSTRTWVLPTYNNHLYKRLGESLQSNTYNGFSTPWGYFDFNRFHCHFSPRDWQRLINNNWGMRPKAMRVKIFNIQVKEVTTSNGETTVANNLTSTVQIFADSSYELPYVMDAGQEGSLPPFPNDVFMVPQYGYCGLVTGNTSQQQTDRNAFYCLEYFPSQMLRTGNNFEITYSFEKVPFHSMYAHSQSLDRLMNPLIDQYLWGLQSTTTGTTLNAGTATTNFTKLRPTNFSNFKKNWLPGPSIKQQGFSKTANQNYKIPATGSDSLIKYETHSTLDGRWSALTPGPPMATAGPADSKFSNSQLIFAGPKQNGNTATVPGTLIFTSEEELAATNATDTDMWGNLPVRDFSLSNLPTVDRTTKLGAVPGMVWQNRDIYYQGPIWAKIPHTDGHFHPSPLIGGFGLKHPPPQIFIKNTPVPANPATTFSSTPVNSFITQYSTGQVSVQIDWEIQKERSKRWNPEVQFTSNYGQQNSLLWAPDAAGKYTEPRAIGTRYLTHHL

SEQ ID NO: 1256 - protein, 735 aa, Artificial Sequence
  Synthetic polypeptide
MAADGYLPDWLEDNLSEGVREWWALQPGAPKPKANQQHQDNARGLVLPGYKYLGPGNGLDKGEPVNAADAAALEHDKAYDQQLKAGDNPYLKYNHADAEFQQRLQGDTSFGGNLGRAVFQAKKRVLEPLGLVEQAGETAPGKKRPLIESPQQPDSSTGIGKKGKQPAKKKLVFEDETGAGDGPPEGSTSGAMSDDSEMRAAAGGAAVEGGQGADGVGNASGDWHCDSTWSEGHVTTTSTRTWVLPTYNNHLYKRLGESLQSNTYNGFSTPWGYFDFNRFHCHFSPRDWQRLINNNWGMRPKAMRVKIFNIQVKEVTTSNGETTVANNLTSTVQIFADSSYELPYVMDAGQEGSLPPFPNDVFMVPQYGYCGLVTGNTSQQQTDRNAFYCLEYFPSQMLRTGNNFEITYSFEKVPFHSMYAHSQSLDRLMNPLIDQYLWGLQSTTTGTTLNAGTATTNFTKLRPTNFSNFKKNWLPGPSIKQQGFSKTANQNYFIPATGSDSLIQYETHSTLDGRWSALTPGPPMATAGPADSKFSNSQLIFAGPKQNGNTATVPGTLIFTSEEELAATNATDTDMWGNLPGGDQSNSNLPTVDRLTALGAVPGMVWQNRDIYYQGPIWAKIPHTDGHFHPSPLIGGFGLKHPPPQIFIKNTPVPANPATTFSSTPVNSFITQYSTGQVSVQIDWEIQKERSKRWNPEVQFTSNYGQQNSLLWAPDAAGKYTEPRAIGTRYLTHHL

SEQ ID NO: 1257 - protein, 735 aa, Artificial Sequence
  Synthetic polypeptide
MAADGYLPDWLEDNLSEGVREWWALQPGAPKPKANQQHQDNARGLVLPGYKYLGPGNGLDKGEPVNAADAAALEHDKAYDQQLKAGDNPYLKYNHADAEFQQRLQGDTSFGGNLGRAVFQAKKRVLEPLGLVEQAGETAPGKKRPLIESPQQPDSSTGIGKKGKQPAKKKLVFEDETGAGDGPPEGSTSGAMSDDSEMRAAAGGAAVEGGQGADGVGNASGDWHCDSTWSEGHVTTTSTRTWVLPTYNNHLYKRLGESLQSNTYNGFSTPWGYFDFNRFHCHFSPRDWQRLINNNWGMRPKAMRVKIFNIQVKEVTTSNGETTVANNLTSTVQIFADSSYELPYVMDAGQEGSLPPFPNDVFMVPQYGYCGLVTGNTSQQQTDRNAFYCLEYFPSQMLRTGNNFEITYSFEKVPFHSMYAHSQSLDRLMNPLIDQYLWGLQSTTTGTTLNAGTATTNFTKLRPTNFSNFKKNWLPGPSIKQQGFSKTANQNYEMPATGSDSLIIYETHSTLDGRWSALTPGPPFATAGPADSKFSNSQLIFAGPKQNGNTATVPGTLIFTSEEELAATNATDTDVWGNLPSGDHSQSNLPTVDRPTMLGAVPGMVWQNRDIYYQGPIWAKIPHTDGHFHPSPLIGGFGLKHPPPQIFIKNTPVPANPATTFISTPVNSFITQYSTGQVSVHIDWEIQKERSKRWNPEVQFTSDYGQHSSLLWAPDAAGKYTEPTAIGTRYLTHHL

SEQ ID NO: 1258 - protein, 734 aa, Artificial Sequence
  Synthetic polypeptide
MAADGYLPDWLEDNLSEGVREWWALQPGAPKPKANQQHQDNARGLVLPGYKYLGPGNGLDKGEPVNAADAAALEHDKAYDQQLKAGDNPYLKYNHADAEFQQRLQGDTSFGGNLGRAVFQAKKRVLEPLGLVEQAGETAPGKKRPLIESPQQPDSSTGIGKKGKQPAKKKLVFEDETGAGDGPPEGSTSGAMSDDSEMRAAAGGAAVEGGQGADGVGNASGDWHCDSTWSEGHVTTTSTRTWVLPTYNNHLYKRLGESLQSNTYNGFSTPWGYFDFNRFHCHFSPRDWQRLINNNWGMRPKAMRVKIFNIQVKEVTTSNGETTVANNLTSTVQIFADSSYELPYVMDAGQEGSLPPFPNDVFMVPQYGYCGLVTGNTSQQQTDRNAFYCLEYFPSQMLRTGNNFEITYSFEKVPFHSMYAHSQSLDRLMNPLIDQYLWGLQSTTTGTTLNAGTATTNFTKLRPTNFSNFKKNWLPGPSIKQQGFSKTANQNDIPATGSDSLIKYETHSTLDGRWSALTPGPPMATAGPADSKFSNSQLIFAGPKQNGNTATVPGTLIFTSEEELAATNATDTDMWGNLPGGDQSNSNLPTVDRLTALGAVPGMVWQNRDIYYQGPIWAKIPHTDGHFHPSPLIGGFGLKHPPPQIFIKNTPVPANPATTFSSTPVNSFITQYSTGQVSVQIDWEIQKERSKRWNPEVQFTSNYGQQNSLLWAPDAAGKYTEPRAIGTRYLTHHL

SEQ ID NO: 1259 - protein, 735 aa, Artificial Sequence
  Synthetic polypeptide
MAADGYLPDWLEDNLSEGVREWWALQPGAPKPKANQQHQDNARGLVLPGYKYLGPGNGLDKGEPVNAADAAALEHDKAYDQQLKAGDNPYLKYNHADAEFQQRLQGDTSFGGNLGRAVFQAKKRVLEPLGLVEQAGETAPGKKRPLIESPQQPDSSTGIGKKGKQPAKKKLVFEDETGAGDGPPEGSTSGAMSDDSEMRAAAGGAAVEGGQGADGVGNASGDWHCDSTWSEGHVTTTSTRTWVLPTYNNHLYKRLGESLQSNTYNGFSTPWGYFDFNRFHCHFSPRDWQRLINNNWGMRPKAMRVKIFNIQVKEVTTSNGETTVANNLTSTVQIFADSSYELPYVMDAGQEGSLPPFPNDVFMVPQYGYCGLVTGNTSQQQTDRNAFYCLEYFPSQMLRTGNNFEITYSFEKVPFHSMYAHSQSLDRLMNPLIDQYLWGLQSTTTGTTLNAGTATTNFTKLRPTNFSNFKKNWLPGPSIKQQGFSKTANQNYIIPATGSDSLITYETHSTLDGRWSALTPGPPVATAGPADSKFSNSQLIFAGPKQNGNTATVPGTLIFTSEEELAATNATDTDMWGNLPFNDDSSSNLPTVDRSTFLGAVPGMVWQNRDIYYQGPIWAKIPHTDGHFHPSPLIGGFGLKHPPPQIFIKNTPVPANPATTFSSTPVNSFITQYSTGQVSVQIDWEIQKERSKRWNPEVQFTSNYGQQNSLLWAPDAAGKYTEPRAIGTRYLTHHL

SEQ ID NO: 1260 - protein, 733 aa, Artificial Sequence
  Synthetic polypeptide
MAADGYLPDWLEDNLSEGIREWWDLKPGAPKPKANQQKQDDGRGLVLPGYKYLGPFNGLDKGEPVNAADAAALEHDKAYDQQLKAGDNPYLRYNHADAEFQERLQEDTSFGGNLGRAVFQAKKRVLEPLGLVEEGAKTAPGKKRPLESPQEPDSSSGIGKKGKQPARKRLNFEEDTGAGDGPPEGSDTSAMSSDIEMRAAPGGNAVDAGQGSDGVGNASGDWHCDSTWSEGKVTTTSTRTWVLPTYNNHLYLRLGTTSSSNTYNGFSTPWGYFDFNRFHCHFSPRDWQRLINNNWGLRPKAMRVKIFNIQVKEVTTSNGETTVANNLTSTVQIFADSSYELPYVMDAGQEGSLPPFPNDVFMVPQYGYCGIVTGENQNQTDRNAFYCLEYFPSQMLRTGNNFEMAYNFEKVPFHSMYAHSQSLDRLMNPLLDQYLWHLQSTTSGETLNQGNAATTFGKIRSGDFAFYRKNWLPGPCVKQQRFSKTASQNYKIPASGGNALLKYDTHYTLNNRWSNIAPGPPMATAGPSDGDFSNAQLIFPGPSVTGNTTTSANNLLFTSEEEIAATNPRDTDMFGQIADNNQNATTAPITGNVTAMGVLPGMVWQNRDIYYQGPIWAKIPHADGHFHPSPLIGGFGLKHPPPQIFIKNTPVPANPATTFTAARVDSFITQYSTGQVAVQIEWEIEKERSKRWNPEVQFTSNYGNQSSMLWAPDTTGKYTEPRVIGSRYLTNHL

SEQ ID NO: 1261 - protein, 742 aa, Artificial Sequence; identical to SEQ ID NO: 1072
  Synthetic polypeptide

SEQ ID NO: 1262 - protein, 733 aa, Artificial Sequence; identical to SEQ ID NO: 426
  Synthetic polypeptide

SEQ ID NO: 1263 - protein, 733 aa, Artificial Sequence; identical to SEQ ID NO: 143
  Synthetic polypeptide

SEQ ID NO: 1264 - protein, 733 aa, Artificial Sequence; identical to SEQ ID NO: 430
  Synthetic polypeptide

SEQ ID NO: 1265 - protein, 735 aa, Artificial Sequence
  Synthetic polypeptide
MAADGYLPDWLEDNLSEGVREWWALQPGAPKPKANQQHQDNARGLVLPGYKYLGPGNGLDKGEPVNAADAAALEHDKAYDQQLKAGDNPYLKYNHADAEFQQRLQGDTSFGGNLGRAVFQAKKRVLEPLGLVEQAGETAPGKKRPLIESPQQPDSSTGIGKKGKQPAKKKLVFEDETGAGDGPPEGSTSGAMSDDSEMRAAAGGAAVEGGQGADGVGNASGDWHCDSTWSEGHVTTTSTRTWVLPTYNNHLYKRLGESLQSNTYNGFSTPWGYFDFNRFHCHFSPRDWQRLINNNWGMRPKAMRVKIFNIQVKEVTTSNGETTVANNLTSTVQIFADSSYELPYVMDAGQEGSLPPFPNDVFMVPQYGYCGLVTGNTSQQQTDRNAFYCLEYFPSQMLRTGNNFEITYSFEKVPFHSMYAHSQSLDRLMNPLIDQYLWGLQSTTTGTTLNAGTATTNFTKLRPTNFSNFKKNWLPGPSIKQQGFSKTANQNYEIPATGSDSLIEYETHSTLDGRWSALTPGPPMATAGPADSKFSNSQLIFAGPKQNGNTATVPGTLIFTSEEELAATNATDTDMWGNLPGGDQSSSNLPTVDRLTALGAVPGMVWQNRDIYYQGPIWAKIPHTDGHFHPSPLIGGFGLKHPPPQIFIKNTPVPANPATTFSSTPVNSFITQYSTGQVSVQIDWEIQKERSKRWNPEVQFTSNYGQQNSLLWAPDAAGKYTEPRAIGTRYLTHHL

SEQ ID NO: 1266 - protein, 735 aa, Artificial Sequence
  Synthetic polypeptide
MAADGYLPDWLEDNLSEGVREWWALQPGAPKPKANQQHQDNARGLVLPGYKYLGPGNGLDKGEPVNAADAAALEHDKAYDQQLKAGDNPYLKYNHADAEFQQRLQGDTSFGGNLGRAVFQAKKRVLEPLGLVEQAGETAPGKKRPLIESPQQPDSSTGIGKKGKQPAKKKLVFEDETGAGDGPPEGSTSGAMSDDSEMRAAAGGAAVEGGQGADGVGNASGDWHCDSTWSEGHVTTTSTRTWVLPTYNNHLYKRLGESLQSNTYNGFSTPWGYFDFNRFHCHFSPRDWQRLINNNWGMRPKAMRVKIFNIQVKEVTTSNGETTVANNLTSTVQIFADSSYELPYVMDAGQEGSLPPFPNDVFMVPQYGYCGLVTGNTSQQQTDRNAFYCLEYFPSQMLRTGNNFEITYSFEKVPFHSMYAHSQSLDRLMNPLIDQYLWGLQSTTTGTTLNAGTATTNFTKLRPTNFSNFKKNWLPGPSIKQQGFSKTANQNYEIPATGSDSLIEYETHSTLDGRWSALTPGPPMATAGPADSKFSNSQLIFAGPKQNGNTATVPGTLIFTSEEELAATNATDTDMWGNLPGGDQSSSNLPVVRGLRALGAVPGMVWQNRDIYYQGPIWAKIPHTDGHFHPSPLIGGFGLKHPPPQIFIKNTPVPANPATTFSSTPVNSFITQYSTGQVSVQIDWEIQKERSKRWNPEVQFTSNYGQQNSLLWAPDAAGKYTEPRAIGTRYLTHHL

SEQ ID NO: 1267 - protein, 735 aa, Artificial Sequence
  Synthetic polypeptide
MAADGYLPDWLEDNLSEGVREWWALQPGAPKPKANQQHQDNARGLVLPGYKYLGPGNGLDKGEPVNAADAAALEHDKAYDQQLKAGDNPYLKYNHADAEFQQRLQGDTSFGGNLGRAVFQAKKRVLEPLGLVEQAGETAPGKKRPLIESPQQPDSSTGIGKKGKQPAKKKLVFEDETGAGDGPPEGSTSGAMSDDSEMRAAAGGAAVEGGQGADGVGNASGDWHCDSTWSEGHVTTTSTRTWVLPTYNNHLYKRLGESLQSNTYNGFSTPWGYFDFNRFHCHFSPRDWQRLINNNWGMRPKAMRVKIFNIQVKEVTTSNGETTVANNLTSTVQIFADSSYELPYVMDAGQEGSLPPFPNDVFMVPQYGYCGLVTGNTSQQQTDRNAFYCLEYFPSQMLRTGNNFEITYSFEKVPFHSMYAHSQSLDRLMNPLIDQYLWGLQSTTTGTTLNAGTATTNFTKLRPTNFSNFKKNWLPGPSIKQQGFSKTANQNYEIPATGSDSLIEYETHSTLDGRWSALTPGPPMATAGPADSKFSNSQLIFAGPKQNGNTATVPGTLIFTSEEELAATNATDTDMWGNLPGGDQSSSNLPVVNRLSALGAVPGMVWQNRDIYYQGPIWAKIPHTDGHFHPSPLIGGFGLKHPPPQIFIKNTPVPANPATTFSSTPVNSFITQYSTGQVSVQIDWEIQKERSKRWNPEVQFTSNYGQQNSLLWAPDAAGKYTEPRAIGTRYLTHHL

SEQ ID NO: 1268 - protein, 735 aa, Artificial Sequence
  Synthetic polypeptide
MAADGYLPDWLEDNLSEGVREWWALQPGAPKPKANQQHQDNARGLVLPGYKYLGPGNGLDKGEPVNAADAAALEHDKAYDQQLKAGDNPYLKYNHADAEFQQRLQGDTSFGGNLGRAVFQAKKRVLEPLGLVEQAGETAPGKKRPLIESPQQPDSSTGIGKKGKQPAKKKLVFEDETGAGDGPPEGSTSGAMSDDSEMRAAAGGAAVEGGQGADGVGNASGDWHCDSTWSEGHVTTTSTRTWVLPTYNNHLYKRLGESLQSNTYNGFSTPWGYFDFNRFHCHFSPRDWQRLINNNWGMRPKAMRVKIFNIQVKEVTTSNGETTVANNLTSTVQIFADSSYELPYVMDAGQEGSLPPFPNDVFMVPQYGYCGLVTGNTSQQQTDRNAFYCLEYFPSQMLRTGNNFEITYSFEKVPFHSMYAHSQSLDRLMNPLIDQYLWGLQSTTTGTTLNAGTATTNFTKLRPTNFSNFKKNWLPGPSIKQQGFSKTANQNYEIPATGSDSLIEYETHSTLDGRWSALTPGPPMATAGPADSKFSNSQLIFAGPKQNGNTATVPGTLIFTSEEELAATNATDTDMWGNLPGGDQSSSNLPPVMGLGALGAVPGMVWQNRDIYYQGPIWAKIPHTDGHFHPSPLIGGFGLKHPPPQIFIKNTPVPANPATTFSSTPVNSFITQYSTGQVSVQIDWEIQKERSKRWNPEVQFTSNYGQQNSLLWAPDAAGKYTEPRAIGTRYLTHHL

SEQ ID NO: 1269 - protein, 736 aa, Artificial Sequence
  Synthetic polypeptide
MAADGYLPDWLEDNLSEGVREWWALQPGAPKPKANQQHQDNARGLVLPGYKYLGPGNGLDKGEPVNAADAAALEHDKAYDQQLKAGDNPYLKYNHADAEFQQRLQGDTSFGGNLGRAVFQAKKRVLEPLGLVEQAGETAPGKKRPLIESPQQPDSSTGIGKKGKQPAKKKLVFEDETGAGDGPPEGSTSGAMSDDSEMRAAAGGAAVEGGQGADGVGNASGDWHCDSTWSEGHVTTTSTRTWVLPTYNNHLYKRLGESLQSNTYNGFSTPWGYFDFNRFHCHFSPRDWQRLINNNWGMRPKAMRVKIFNIQVKEVTTSNGETTVANNLTSTVQIFADSSYELPYVMDAGQEGSLPPFPNDVFMVPQYGYCGLVTGNTSQQQTDRNAFYCLEYFPSQMLRTGNNFEITYSFEKVPFHSMYAHSQSLDRLMNPLIDQYLWGLQSTTTGTTLNAGTATTNFTKLRPTNFSNFKKNWLPGPSIKQQGFSKTANQNYEIPATGSDSLIEYETHSTLDGRWSALTPGPPMATAGPADSKFSNSQLIFAGPKQNGNTATVPGTLIFTSEEELAATNATDTDMWGNLPGGDQSRVDRLPTVDRLTALGAVPGMVWQNRDIYYQGPIWAKIPHTDGHFHPSPLIGGFGLKHPPPQIFIKNTPVPANPATTFSSTPVNSFITQYSTGQVSVQIDWEIQKERSKRWNPEVQFTSNYGQQNSLLWAPDAAGKYTEPRAIGTRYLTHHL

SEQ ID NO: 1270 - protein, 736 aa, Artificial Sequence
  Synthetic polypeptide
MAADGYLPDWLEDNLSEGVREWWALQPGAPKPKANQQHQDNARGLVLPGYKYLGPGNGLDKGEPVNAADAAALEHDKAYDQQLKAGDNPYLKYNHADAEFQQRLQGDTSFGGNLGRAVFQAKKRVLEPLGLVEQAGETAPGKKRPLIESPQQPDSSTGIGKKGKQPAKKKLVFEDETGAGDGPPEGSTSGAMSDDSEMRAAAGGAAVEGGQGADGVGNASGDWHCDSTWSEGHVTTTSTRTWVLPTYNNHLYKRLGESLQSNTYNGFSTPWGYFDFNRFHCHFSPRDWQRLINNNWGMRPKAMRVKIFNIQVKEVTTSNGETTVANNLTSTVQIFADSSYELPYVMDAGQEGSLPPFPNDVFMVPQYGYCGLVTGNTSQQQTDRNAFYCLEYFPSQMLRTGNNFEITYSFEKVPFHSMYAHSQSLDRLMNPLIDQYLWGLQSTTTGTTLNAGTATTNFTKLRPTNFSNFKKNWLPGPSIKQQGFSKTANQNYEIPATGSDSLIEYETHSTLDGRWSALTPGPPMATAGPADSKFSNSQLIFAGPKQNGNTATVPGTLIFTSEEELAATNATDTDMWGNLPGGDQSRALRLPTVDRLTALGAVPGMVWQNRDIYYQGPIWAKIPHTDGHFHPSPLIGGFGLKHPPPQIFIKNTPVPANPATTFSSTPVNSFITQYSTGQVSVQIDWEIQKERSKRWNPEVQFTSNYGQQNSLLWAPDAAGKYTEPRAIGTRYLTHHL

SEQ ID NO: 1271 - DNA, 1172 bp, Artificial Sequence
  Synthetic polynucleotide
cttaattaggctgcgcgctcgctcgctcactgaggccgcccgggcaaagcccgggcgtcgggcgacctttggtcgcccggcctcagtgagcgagcgagcgcgcagagagggagtggccaactccatcactaggggttccttgtagttaatgattaacccgccatgctacttatctaccagggtaatggggatcctctagaactatagctagtcgacattgattattgactagttattaatagtaatcaattacggggtcattagttcatagcccatatatggagttccgcgttacataacttacggtaaatggcccgcctggctgaccgcccaacgacccccgcccattgacgtcaataatgacgtatgttcccatagtaacgccaatagggactttccattgacgtcaatgggtggactatttacggtaaactgcccacttggcagtacatcaagtgtatcatatgccaagtacgccccctattgacgtcaatgacggtaaatggcccgcctggcattatgcccagtacatgaccttatgggactttcctacttggcagtacatctacgtattagtcatcgctattaccatgtcgaggccacgttctgcttcactctccccatctcccccccctccccacccccaattttgtatttatttattttttaattattttgtgcagcgatgggggcggggggggggggcgcgcgccaggcggggcggggcggggcgaggggcggggcggggcgaggcggagaggtgcggcggcagccaatcagagcggcgcgctccgaaagtttccttttatggcgaggcggcggcggcggcggccctataaaaagcgaagcgcgcggcgggcgggagcaagctttattgcggtagtttatcacagttaaattgctaacgcagtcagtgcttctgacacaacagtctcgaacttaagctgcagaagttggtcgtgaggcactgggcaggtaagtatcaaggttacaagacaggtttaaggagaccaatagaaactgggcttgtcgagacagagaagactcttgcgtttctgataggcacctattggtcttactgacatccactttgcctttctctccacaggtgtccactcccagttcaattacagctcttaaggctagagtacttaatacgactcsactatagg

SEQ ID NO: 1272 - DNA, 3231 bp, Artificial Sequence
  Synthetic polynucleotide
taagaattcacgcgtggtacctctagagtcgacccgggcggcctcgaggacggggtgaactacgcctgaggatccgatctttttccctctgccaaaaattatggggacatcatgaagccccttgagcatctgacttctggctaataaaggaaatttattttcattgcaatagtgtgttggaattttttgtgtctctcactcggaagcaattcgttgatctgaatttcgaccacccataatacccattaccctggtagataagtagcatggcgggttaatcattaactacaaggaacccctagtgatggagttggccactccctctctgcgcgctcgctcgctcactgaggccgggcgaccaaaggtcgcccgacgcccgggctttgcccgggcggcctcagtgagcgagcgagcgcgcagccttaattaacctaattcactggccgtcgttttacaacgtcgtgactgggaaaaccctggcgttacccaacttaatcgccttgcagcacatccccctttcgccagctggcgtaatagcgaagaggcccgcaccgatcgcccttcccaacagttgcgcagcctgaatggcgaatgggacgcgccctgtagcggcgcattaagcgcggcgggtgtggtggttacgcgcagcgtgaccgctacacttgccagcgccctagcgcccgctcctttcgctttcttcccttcctttctcgccacgttcgccggctttccccgtcaagctctaaatcgggggctccctttagggttccgatttagtgctttacggcacctcgaccccaaaaaacttgattagggtgatggttcacgtagtgggccatcgccctgatagacggtttttcgccctttgacgttggagtccacgttctttaatagtggactcttgttccaaactggaacaacactcaaccctatctcggtctattcttttgatttataagggattttgccgatttcggcctattggttaaaaaatgagctgatttaacaaaaatttaacgcgaattttaacaaaatattaacgcttacaatttaggtggcacttttcggggaaatgtgcgcggaacccctatttgtttatttttctaaatacattcaaatatgtatccgctcatgagacaataaccctgataaatgcttcaataatattgaaaaaggaagagtatgagtattcaacatttccgtgtcgcccttattcccttttttgcggcattttgccttcctgtttttgctcacccagaaacgctggtgaaagtaaaagatgctgaagatcagttgggtgcacgagtgggttacatcgaactggatctcaacagcggtaagatccttgagagttttcgccccgaagaacgttttccaatgatgagcacttttaaagttctgctatgtggcgcggtattatcccgtattgacgccgggcaagagcaactcggtcgccgcatacactattctcagaatgacttggttgagtactcaccagtcacagaaaagcatcttacggatggcatgacagtaagagaattatgcagtgctgccataaccatgagtgataacactgcggccaacttacttctgacaacgatcggaggaccgaaggagctaaccgcttttttgcacaacatgggggatcatgtaactcgccttgatcgttgggaaccggagctgaatgaagccataccaaacgacgagcgtgacaccacgatgcctgtagcaatggcaacaacgttgcgcaaactattaactggcgaactacttactctagcttcccggcaacaattaatagactggatggaggcggataaagttgcaggaccacttctgcgctcggcccttccggctggctggtttattgctgataaatctggagccggtgagcgtgggtctcgcggtatcattgcagcactggggccagatggtaagccctcccgtatcgtagttatctacacgacggggagtcaggcaactatggatgaacgaaatagacagatcgctgagataggtgcctcactgattaagcattggtaactgtcagaccaagtttactcatatatactttagattgatttaaaacttcatttttaatttaaaaggatctaggtgaagatcctttttgataatctcatgaccaaaatcccttaacgtgagttttcgttccactgagcgtcagaccccgtagaaaagatcaaaggatcttcttgagatcctttttttctgcgcgtaatctgctgcttgcaaacaaaaaaaccaccgctaccagcggtggtttgtttgccggatcaagagctaccaactctttttccgaaggtaactggcttcagcagagcgcagataccaaatactgttcttctagtgtagccgtagttaggccaccacttcaagaactctgtagcaccgcctacatacctcgctctgctaatcctgttaccagtggctgctgccagtggcgataagtcgtgtcttaccgggttggactcaagacgatagttaccggataaggcgcagcggtcgggctgaacggggggttcgtgcacacagcccagcttggagcgaacgacctacaccgaactgagatacctacagcgtgagctatgagaaagcgccacgcttcccgaagggagaaaggcggacaggtatccggtaagcggcagggtcggaacaggagagcgcacgagggagcttccagggggaaacgcctggtatctttatagtcctgtcgggtttcgccacctctgacttgagcgtcgatttttgtgatgctcgtcaggggggcggagcctatggaaaaacgccagcaacgcggcctttttacggttcctggccttttgctggccttttgctcacatgttctttcctgcgttatcccctgattctgtggataaccgtattaccgcctttgagtgagctgataccgctcgccgcagccgaacgaccgagcgcagcgagtcagtgagcgaggaagcggaagagcgcccaatacgcaaaccgcctctccccgcgcgttggccgattcattaatgcagctggcacgacaggtttcccgactggaaagcgggcagtgagcgcaacgcaattaatgtgagttagctcactcattaggcaccccaggctttacactttatgcttccggctcgtatgttgtgtggaattgtgagcggataacaatttcacacaggaaacagctatgaccatgattacgccagatttaattaaggc

SEQ ID NO: 1273 - protein, 737 aa, Artificial Sequence
  Synthetic polypeptide
  MOD_RES (264)..(264): Any naturally occurring amino acid
  MOD_RES (266)..(266): Any naturally occurring amino acid
  MOD_RES (268)..(268): Any naturally occurring amino acid
  MOD_RES (448)..(448): Any naturally occurring amino acid
  MOD_RES (459)..(460): Any naturally occurring amino acid
  MOD_RES (467)..(467): Any naturally occurring amino acid
  MOD_RES (470)..(471): Any naturally occurring amino acid
  MOD_RES (474)..(474): Any naturally occurring amino acid
  MOD_RES (495)..(495): Any naturally occurring amino acid
  MOD_RES (516)..(516): Any naturally occurring amino acid
  MOD_RES (533)..(533): Any naturally occurring amino acid
  MOD_RES (547)..(547): Any naturally occurring amino acid
  MOD_RES (551)..(551): Any naturally occurring amino acid
  MOD_RES (555)..(555): Any naturally occurring amino acid
  MOD_RES (557)..(557): Any naturally occurring amino acid
  MOD_RES (561)..(561): Any naturally occurring amino acid
  MOD_RES (563)..(563): Any naturally occurring amino acid
  MOD_RES (577)..(577): Any naturally occurring amino acid
  MOD_RES (583)..(583): Any naturally occurring amino acid
  MOD_RES (593)..(593): Any naturally occurring amino acid
  MOD_RES (596)..(596): Any naturally occurring amino acid
  MOD_RES (661)..(662): Any naturally occurring amino acid
  MOD_RES (664)..(665): Any naturally occurring amino acid
  MOD_RES (710)..(710): Any naturally occurring amino acid
  MOD_RES (717)..(719): Any naturally occurring amino acid
  MOD_RES (723)..(723): Any naturally occurring amino acid
MAADGYLPDWLEDNLSEGIREWWDLKPGAPKPKANQQKQDDGRGLVLPGYKYLGPFNGLDKGEPVNAADAAALEHDKAYDQQLKAGDNPYLRYNHADAEFQERLQEDTSFGGNLGRAVFQAKKRVLEPLGLVEEGAKTAPGKKRPVEPSPQRSPDSSTGIGKKGQQPAKKRLNFGQTGDSESVPDPQPLGEPPAGPSGLGSGTMAAGGGAPMADNNEGADGVGNASGNWHCDSTWLGDRVITTSTRTWALPTYNNHLYKQISSXSXGXTNDNHYFGYSTPWGYFDFNRFHCHFSPRDWQRLINNNWGFRPKRLNFKLFNIQVKEVTTNDGVTTIANNLTSTVQVFSDSEYQLPYVLGSAHQGCLPPFPADVFMIPQYGYLTLNNGSQAVGRSSFYCLEYFPSQMLRTGNNFTFSYTFEDVPFHSSYAHSQSLDRLMNPLIDQYLYYLXRTQSTGGTAGXXELLFSQXGPXXMSXQAKNWLPGPCYRQQRVSKTLXQNNNSNFAWTGATKYHLNGRXSLVNPGVAMATHKDDEXRFFPSSGVLIFGKXGAGXNNTXLXNVMXTXEEEIKTTNPVATEXYGVVAXNLQSSNTAPXTGXVNSQGALPGMVWQNRDVYLQGPIWAKIPHTDGNFHPSPLMGGFGLKHPPPQILIKNTPVPANPPXXFXXAKFASFITQYSTGQVSVEIEWELQKENSKRWNPEIQYTSNYAKSXNVDFAVXXXGVYXEPRPIGTRYLTRNL

SEQ ID NO: 1274 - protein, 737 aa, Artificial Sequence
  Synthetic polypeptide
MAADGYLPDWLEDNLSEGIREWWDLKPGAPKPKANQQKQDDGRGLVLPGYKYLGPFNGLDKGEPVNAADAAALEHDKAYDQQLKAGDNPYLRYNHADAEFQERLQEDTSFGGNLGRAVFQAKKRVLEPLGLVEEGAKTAPGKKRPVEPSPQRSPDSSTGIGKKGQQPAKKRLNFGQTGDSESVPDPQPLGEPPAGPSGLGSGTMAAGGGAPMADNNEGADGVGNASGNWHCDSTWLGDRVITTSTRTWALPTYNNHLYKQISSASSGSTNDNHYFGYSTPWGYFDFNRFHCHFSPRDWQRLINNNWGFRPKRLNFKLFNIQVKEVTTNDGVTTIANNLTSTVQVFSDSEYQLPYVLGSAHQGCLPPFPADVFMIPQYGYLTLNNGSQAVGRSSFYCLEYFPSQMLRTGNNFTFSYTFEDVPFHSSYAHSQSLDRLMNPLIDQYLYYLARTQSTGGTAGNRELLFSQGGPSNMSAQAKNWLPGPCYRQQRVSKTLAQNNNSNFAWTGATKYHLNGRDSLVNPGVAMATHKDDEDRFFPSSGVLIFGKEGAGANNTALENVMLTNEEEIKTTNPVATEQYGVVASNLQSSNTAPATGAVNSQGALPGMVWQNRDVYLQGPIWAKIPHTDGNFHPSPLMGGFGLKHPPPQILIKNTPVPANPPATFTPAKFASFITQYSTGQVSVEIEWELQKENSKRWNPEIQYTSNYAKSTNVDFAVNNEGVYSEPRPIGTRYLTRNL

SEQ ID NO: 1275 - protein, 737 aa, Artificial Sequence
  Synthetic polypeptide
MAADGYLPDWLEDNLSEGIREWWDLKPGAPKPKANQQKQDDGRGLVLPGYKYLGPFNGLDKGEPVNAADAAALEHDKAYDQQLKAGDNPYLRYNHADAEFQERLQEDTSFGGNLGRAVFQAKKRVLEPLGLVEEGAKTAPGKKRPVEPSPQRSPDSSTGIGKKGQQPAKKRLNFGQTGDSESVPDPQPLGEPPAGPSGLGSGTMAAGGGAPMADNNEGADGVGNASGNWHCDSTWLGDRVITTSTRTWALPTYNNHLYKQISSQSSGSTNDNHYFGYSTPWGYFDFNRFHCHFSPRDWQRLINNNWGFRPKRLNFKLFNIQVKEVTTNDGVTTIANNLTSTVQVFSDSEYQLPYVLGSAHQGCLPPFPADVFMIPQYGYLTLNNGSQAVGRSSFYCLEYFPSQMLRTGNNFTFSYTFEDVPFHSSYAHSQSLDRLMNPLIDQYLYYLSRTQSTGGTAGNRELLFSQGGPANMSAQAKNWLPGPCYRQQRVSKTLSQNNNSNFAWTGATKYHLNGRDSLVNPGVAMATHKDDEERFFPSSGVLIFGKQGAGANNTTLDNVMMTSEEEIKTTNPVATEQYGVVASNLQSSNTAPQTGTVNSQGALPGMVWQNRDVYLQGPIWAKIPHTDGNFHPSPLMGGFGLKHPPPQILIKNTPVPANPPAVFSPAKFASFITQYSTGQVSVEIEWELQKENSKRWNPEIQYTSNYAKSTNVDFAVNSEGVYSEPRPIGTRYLTRNL

SEQ ID NO: 1276 - protein, 737 aa, Artificial Sequence
  Synthetic polypeptide
MAADGYLPDWLEDNLSEGIREWWDLKPGAPKPKANQQKQDDGRGLVLPGYKYLGPFNGLDKGEPVNAADAAALEHDKAYDQQLKAGDNPYLRYNHADAEFQERLQEDTSFGGNLGRAVFQAKKRVLEPLGLVEEGAKTAPGKKRPVEPSPQRSPDSSTGIGKKGQQPAKKRLNFGQTGDSESVPDPQPLGEPPAGPSGLGSGTMAAGGGAPMADNNEGADGVGNASGNWHCDSTWLGDRVITTSTRTWALPTYNNHLYKQISSASSGSTNDNHYFGYSTPWGYFDFNRFHCHFSPRDWQRLINNNWGFRPKRLNFKLFNIQVKEVTTNDGVTTIANNLTSTVQVFSDSEYQLPYVLGSAHQGCLPPFPADVFMIPQYGYLTLNNGSQAVGRSSFYCLEYFPSQMLRTGNNFTFSYTFEDVPFHSSYAHSQSLDRLMNPLIDQYLYYLARTQSTGGTAGTRELLFSQGGPSNMSAQAKNWLPGPCYRQQRVSKTLTQNNNSNFAWTGATKYHLNGRDSLVNPGVAMATHKDDEDRFFPSSGVLIFGKQGAGANNTALDNVMITNEEEIKTTNPVATEQYGVVASNLQSSNTAPATGTVNSQGALPGMVWQNRDVYLQGPIWAKIPHTDGNFHPSPLMGGFGLKHPPPQILIKNTPVPANPPTVFSPAKFASFITQYSTGQVSVEIEWELQKENSKRWNPEIQYTSNYAKSTNVDFAVNSEGVYTEPRPIGTRYLTRNL

SEQ ID NO: 1277 - protein, 737 aa, Artificial Sequence
  Synthetic polypeptide
  MOD_RES (264)..(264): Any naturally occurring amino acid
  MOD_RES (448)..(448): Any naturally occurring amino acid
  MOD_RES (459)..(459): Any naturally occurring amino acid
  MOD_RES (470)..(470): Any naturally occurring amino acid
  MOD_RES (495)..(495): Any naturally occurring amino acid
  MOD_RES (533)..(533): Any naturally occurring amino acid
  MOD_RES (547)..(547): Any naturally occurring amino acid
  MOD_RES (555)..(555): Any naturally occurring amino acid
  MOD_RES (557)..(557): Any naturally occurring amino acid
  MOD_RES (561)..(561): Any naturally occurring amino acid
  MOD_RES (563)..(563): Any naturally occurring amino acid
  MOD_RES (593)..(593): Any naturally occurring amino acid
  MOD_RES (596)..(596): Any naturally occurring amino acid
  MOD_RES (661)..(662): Any naturally occurring amino acid
  MOD_RES (664)..(664): Any naturally occurring amino acid
  MOD_RES (718)..(718): Any naturally occurring amino acid
  MOD_RES (723)..(723): Any naturally occurring amino acid
MAADGYLPDWLEDNLSEGIREWWDLKPGAPKPKANQQKQDDGRGLVLPGYKYLGPFNGLDKGEPVNAADAAALEHDKAYDQQLKAGDNPYLRYNHADAEFQERLQEDTSFGGNLGRAVFQAKKRVLEPLGLVEEGAKTAPGKKRPVEPSPQRSPDSSTGIGKKGQQPAKKRLNFGQTGDSESVPDPQPLGEPPAGPSGLGSGTMAAGGGAPMADNNEGADGVGNASGNWHCDSTWLGDRVITTSTRTWALPTYNNHLYKQISSXSSGSTNDNHYFGYSTPWGYFDFNRFHCHFSPRDWQRLINNNWGFRPKRLNFKLFNIQVKEVTTNDGVTTIANNLTSTVQVFSDSEYQLPYVLGSAHQGCLPPFPADVFMIPQYGYLTLNNGSQAVGRSSFYCLEYFPSQMLRTGNNFTFSYTFEDVPFHSSYAHSQSLDRLMNPLIDQYLYYLXRTQSTGGTAGXRELLFSQGGPXNMSAQAKNWLPGPCYRQQRVSKTLXQNNNSNFAWTGATKYHLNGRDSLVNPGVAMATHKDDEXRFFPSSGVLIFGKXGAGANNTXLXNVMXTXEEEIKTTNPVATEQYGVVASNLQSSNTAPXTGXVNSQGALPGMVWQNRDVYLQGPIWAKIPHTDGNFHPSPLMGGFGLKHPPPQILIKNTPVPANPPXXFXPAKFASFITQYSTGQVSVEIEWELQKENSKRWNPEIQYTSNYAKSTNVDFAVNXEGVYXEPRPIGTRYLTRNL

SEQ ID NO: 1278 - protein, 737 aa, Artificial Sequence
  Synthetic polypeptide
  MOD_RES (264)..(264): Any naturally occurring amino acid
  MOD_RES (448)..(448): Any naturally occurring amino acid
  MOD_RES (470)..(470): Any naturally occurring amino acid
  MOD_RES (533)..(533): Any naturally occurring amino acid
  MOD_RES (547)..(547): Any naturally occurring amino acid
  MOD_RES (555)..(555): Any naturally occurring amino acid
  MOD_RES (557)..(557): Any naturally occurring amino acid
  MOD_RES (561)..(561): Any naturally occurring amino acid
  MOD_RES (563)..(563): Any naturally occurring amino acid
  MOD_RES (593)..(593): Any naturally occurring amino acid
  MOD_RES (596)..(596): Any naturally occurring amino acid
  MOD_RES (662)..(662): Any naturally occurring amino acid
  MOD_RES (664)..(664): Any naturally occurring amino acid
  MOD_RES (718)..(718): Any naturally occurring amino acid
MAADGYLPDWLEDNLSEGIREWWDLKPGAPKPKANQQKQDDGRGLVLPGYKYLGPFNGLDKGEPVNAADAAALEHDKAYDQQLKAGDNPYLRYNHADAEFQERLQEDTSFGGNLGRAVFQAKKRVLEPLGLVEEGAKTAPGKKRPVEPSPQRSPDSSTGIGKKGQQPAKKRLNFGQTGDSESVPDPQPLGEPPAGPSGLGSGTMAAGGGAPMADNNEGADGVGNASGNWHCDSTWLGDRVITTSTRTWALPTYNNHLYKQISSXSSGSTNDNHYFGYSTPWGYFDFNRFHCHFSPRDWQRLINNNWGFRPKRLNFKLFNIQVKEVTTNDGVTTIANNLTSTVQVFSDSEYQLPYVLGSAHQGCLPPFPADVFMIPQYGYLTLNNGSQAVGRSSFYCLEYFPSQMLRTGNNFTFSYTFEDVPFHSSYAHSQSLDRLMNPLIDQYLYYLXRTQSTGGTAGNRELLFSQGGPXNMSAQAKNWLPGPCYRQQRVSKTLSQNNNSNFAWTGATKYHLNGRDSLVNPGVAMATHKDDEXRFFPSSGVLIFGKXGAGANNTXLXNVMXTXEEEIKTTNPVATEQYGVVASNLQSSNTAPXTGXVNSQGALPGMVWQNRDVYLQGPIWAKIPHTDGNFHPSPLMGGFGLKHPPPQILIKNTPVPANPPAXFXPAKFASFITQYSTGQVSVEIEWELQKENSKRWNPEIQYTSNYAKSTNVDFAVNXEGVYSEPRPIGTRYLTRNL

SEQ ID NO: 1279 - DNA, 2217 bp, Artificial Sequence
  Synthetic polynucleotide
atggctgccgatggttatcttccagattggctcgaggacactctctctgaaggaataagacagtggtggaagctcaaacctggcccaccaccaccaaagcccgcagagcggcataaggacgacagcaggggtcttgtgcttcctgggtacaagtacctcggacccttcaacggactcgacaagggagagccggtcaacgaggcagacgccgcggccctcgagcacgacaaagcctacgaccggcagctcgacagcggagacaacccgtacctcaagtacaaccacgccgacgcggagtttcaggagcgccttaaagaagatacgtcttttgggggcaacctcggacgagcagtcttccaggcgaaaaagagggttcttgaacctctgggcctggttgaggaacctgttaagacggctccgggaaagaagagaccggtagagccatcaccccagcgttctccagactcctctacgggcatcggcaagaaaggccaacagcccgccagaaaaagactcaattttggtcagactggcgactcagagtcagttccagaccctcaacctctcggagaacctccagcagcgccctctggtgtgggacctaatacaatggctgcaggcggtggcgcaccaatggcagacaataacgaaggcgccgacggagtgggtagttcctcgggaaattggcattgcgattccacatggctgggcgacagagtcatcaccaccagcacccgaacctgggccctgcccacctacaacaaccacctctacaagcaaatctccaacgggacatcgggaggagccaccaacgacaacacctacttcggctacagcaccccctgggggtattttgactttaacagattccactgccacttttcaccacgtgactggcagcgactcatcaacaacaactggggattccggcccaagagactcagcttcaagctcttcaacatccaggtcaaggaggtcacgcagaatgaaggcaccaagaccatcgccaataacctcaccagcaccatccaggtgtttacggactcggagtaccagctgccgtacgttctcggctctgcccaccagggctgcctgcctccgttcccggcggacgtgttcatgattccccagtacggctacctaacactcaacaacggtagtcaggccgtgggacgctcctccttctactgcctggaatactttccttcgcagatgctgagaaccggcaacaacttccagtttacttacaccttcgaggacgtgcctttccacagcagctacgcccacagccagagcttggaccggctgatgaatcctctgattgaccagtacctgtactacttgtctcggactcaaacaacaggaggcacggcaaatacgcagactctgggcttcagccaaggtgggcctaatacaatggccaatcaggcaaagaactggctgccaggaccctgttaccgccaacaacgcgtctcaacgacaaccgggcaaaacaacaatagcaactttgcctggactgctgggaccaaataccatctgaatggaagaaattcattggctaatcctggcatcgctatggcaacacacaaagacgacgaggagcgtttttttcccagtaacgggatcctgatttttggcaaacaaaatgctgccagagacaatgcggattacagcgatgtcatgctcaccagcgaggaagaaatcaaaaccactaaccctgtggctacagaggaatacggtatcgtggcagataacttgcagcagcaaaacacggctcctcaaattggaactgtcaacagccagggggccttacccggtatggtctggcagaaccgggacgtgtacctgcagggtcccatctgggccaagattcctcacacggacggcaacttccacccgtctccgctgatgggcggctttggcctgaaacatcctccgcctcagatcctgatcaagaacacgcctgtacctgcggatcctccgaccaccttcaaccagtcaaagctgaactctttcatcacgcaatacagcaccggacaggtcagcgtggaaattgaatgggagctgcagaaggaaaacagcaagcgctggaaccccgagatccagtacacctccaactactacaaatctacaagtgtggactttgctgttaatacagaaggcgtgtactctgaaccccgccccattggcacccgttacctcacccgtaatctgtaa

SEQ ID NO: 1280 - protein, 733 aa, Artificial Sequence; identical to SEQ ID NO: 1065
  Synthetic polypeptide

SEQ ID NO: 1281 - DNA, 2203 bp, Artificial Sequence
  Synthetic polynucleotide
atgtcttttgttgatcaccctccagattggttggaagaagttggtgaaggtcttcgcgagtttttgggccttgaagcgggcccaccgaaaccaaaacccaatcagcagcatcaagatcaagcccgtggtcttgtgctgcctggttataactatctcggacccggaaacggtctcgatcgaggagagcctgtcaacagggcagacgaggtcgcgcgagagcacgacatctcgtacaacgagcagcttgaggcgggagacaacccctacctcaagtacaaccacgcggacgccgagtttcaggagaagctcgccgacgacacatccttcgggggaaacctcggaaaggcagtctttcaggccaagaaaagggttctcgaaccttttggcctggttgaagagggtgctaagacggcccctaccggaaagcggatagacgaccactttccaaaaagaaagaaggctcggaccgaagaggactccaagccttccacctcgtcagacgccgaagctggacccagcggatcccagcagctgcaaatcccagcccaaccagcctcaagtttgggagctgatacaatgtctgcgggaggtggcggcccattgggcgacaataaccaaggtgccgatggagtgggcaatgcctcgggagattggcattgcgattccacgtggatgggggacagagtcgtcaccaagtccacccgaacctgggtgctgcccagctacaacaaccaccagtaccgagagatcaaaagcggctccgtcgacggaagcaacgccaacgcctactttggatacagcaccccctgggggtactttgactttaaccgcttccacagccactggagcccccgagactggcaaagactcatcaacaactactggggcttcagaccccggtccctcagagtcaaaatcttcaacattcaagtcaaagaggtcacggtgcaggactccaccaccaccatcgccaacaacctcacctccaccgtccaagtgtttacggacgacgactaccagctgccctacgtcgtcggcaacgggaccgagggatgcctgccggccttccctccgcaggtctttacgctgccgcagtacggttacgcgacgctgaaccgcgacaacacagaaaatcccaccgagaggagcagcttcttctgcctagagtactttcccagcaagatgctgagaacgggcaacaactttgagtttacctacaactttgaggaggtgcccttccactccagcttcgctcccagtcagaacctgttcaagctggccaacccgctggtggaccagtacttgtaccgcttcgtgagcacaaataacactggcggagtccagttcaacaagaacctggccgggagatacgccaacacctacaaaaactggttcccggggcccatgggccgaacccagggctggaacctgggctccggggtcaaccgcgccagtgtcagcgccttcgccacgaccaataggatggagctcgagggcgcgagttaccaggtgcccccgcagccgaacggcatgaccaacaacctccagggcagcaacacctatgccctggagaacactatgatcttcaacagccagccggcgaacccgggcaccaccgccacgtacctcgagggcaacatgctcatcaccagcgagagcgagacgcagccggtgaaccgcgtggcgtacaacgtcggcgggcaggtggccaccaacaaccagagctccaccactgcccccgcgaccggcacgtacaacctccaggaaatcgtgcccggcagcgtgtggatggagagggacgtgtacctccaaggacccatctgggccaagatcccagagacgggggcgcactttcacccctctccggccatgggcggattcggactcaaacacccaccgcccatgatgctcatcaagaacacgcctgtgcccggaaatatcaccagcttctcggacgtgcccgtcagcagcttcatcacccagtacagcaccgggcaggtcaccgtggagatggagtgggagctcaagaaggaaaactccaagaggtggaacccagagatccagtacacaaacaactacaacgacccccagtttgtggactttgccccggacagcaccggggaatacagaaccaccagacctatcggaacccgataccttacccgacccctttaacccattcatgtcgcataccctcaataaa

SEQ ID NO: 1282 - protein, 724 aa, Artificial Sequence
  Synthetic polypeptide
MSFVDHPPDWLEEVGEGLREFLGLEAGPPKPKPNQQHQDQARGLVLPGYNYLGPGNGLDRGEPVNRADEVAREHDISYNEQLEAGDNPYLKYNHADAEFQEKLADDTSFGGNLGKAVFQAKKRVLEPFGLVEEGAKTAPTGKRIDDHFPKRKKARTEEDSKPSTSSDAEAGPSGSQQLQIPAQPASSLGADTMSAGGGGPLGDNNQGADGVGNASGDWHCDSTWMGDRVVTKSTRTWVLPSYNNHQYREIKSGSVDGSNANAYFGYSTPWGYFDFNRFHSHWSPRDWQRLINNYWGFRPRSLRVKIFNIQVKEVTVQDSTTTIANNLTSTVQVFTDDDYQLPYVVGNGTEGCLPAFPPQVFTLPQYGYATLNRDNTENPTERSSFFCLEYFPSKMLRTGNNFEFTYNFEEVPFHSSFAPSQNLFKLANPLVDQYLYRFVSTNNTGGVQFNKNLAGRYANTYKNWFPGPMGRTQGWNLGSGVNRASVSAFATTNRMELEGASYQVPPQPNGMTNNLQGSNTYALENTMIFNSQPANPGTTATYLEGNMLITSESETQPVNRVAYNVGGQVATNNQSSTTAPATGTYNLQEIVPGSVWMERDVYLQGPIWAKIPETGAHFHPSPAMGGFGLKHPPPMMLIKNTPVPGNITSFSDVPVSSFITQYSTGQVTVEMEWELKKENSKRWNPEIQYTNNYNDPQFVDFAPDSTGEYRTTRPIGTRYLTRPL

SEQ ID NO: 1283 - DNA, 2203 bp, Artificial Sequence
  Synthetic polynucleotide
atgtcttttgttgatcaccctccagattggttggaagaagttggtgaaggtcttcgcgagtttttgggccttgaagcgggcccaccgaaaccaaaacccaatcagcagcatcaagatcaagcccgtggtcttgtgctgcctggttataactatctcggacccggaaacggtctcgatcgaggagagcctgtcaacagggcagacgaggtcgcgcgagagcacgacatctcgtacaacgagcagcttgaggcgggagacaacccctacctcaagtacaaccacgcggacgccgagtttcaggagaagctcgccgacgacacatccttcgggggaaacctcggaaaggcagtctttcaggccaagaaaagggttctcgaaccttttggcctggttgaagagggtgctaagacggcccctaccggaaagcggatagacgaccactttccaaaaagaaagaaggctcggaccgaagaggactccaagccttccacctcgtcagacgccgaagctggacccagcggatcccagcagctgcaaatcccagcccaaccagcctcaagtttgggagctgatacaatgtctgcgggaggtggcggcccattgggcgacaataaccaaggtgccgatggagtgggcaatgcctcgggagattggcattgcgattccacgtggatgggggacagagtcgtcaccaagtccacccgaacctgggtgctgcccagctacaacaaccaccagtaccgagagatcaaaagcggctccgtcgacggaagcaacgccaacgcctactttggatacagcaccccctgggggtactttgactttaaccgcttccacagccactggagcccccgagactggcaaagactcatcaacaactactggggcttcagaccccggtccctcagagtcaaaatcttcaacattcaagtcaaagaggtcacggtgcaggactccaccaccaccatcgccaacaacctcacctccaccgtccaagtgtttacggacgacgactaccagctgccctacgtcgtcggcaacgggaccgagggatgcctgccggccttccctccgcaggtctttacgctgccgcagtacggttacgcgacgctgaaccgcgacaacacagaaaatcccaccgagaggagcagcttcttctgcctagagtactttcccagcaagatgctgagaacgggcaacaactttgagtttacctacaactttgaggaggtgcccttccactccagcttcgctcccagtcagaacctgttcaagctggccaacccgctggtggaccagtacttgtaccgcttcgtgagcacaaataacactggcggagtccagttcaacaagaacctggccgggagatacgccaacacctacaaaaactggttcccggggcccatgggccgaacccagggctggaacctgggctccggggtcaaccgcgccagtgtcagcgccttcgccacgaccaataggatggagctcgagggcgcgagttaccaggtgcccccgcagccgaacggcatgaccaacaacctccagggcagcaacacctatgccctggagaacactatgatcttcaacagccagccggcgaacccgggcaccaccgccacgtacctcgagggcaacatgctcatcaccagcgagagcgagacgcagccggtgaaccgcgtggcgtacaacgtcggcgggcagatggccaccaacaaccagagctccaccactgcccccgcgaccggcacggtcaacctccaggaaatcgtgcccggcagcgtgtggatggagagggacgtgtacctccaaggacccatctgggccaagatcccagagacgggggcgcactttcacccctctccggccatgggcggattcggactcaaacacccaccgcccatgatgctcatcaagaacacgcctgtgcccggaaatatcaccagcttctcggacgtgcccgtcagcagcttcatcacccagtacagcaccgggcaggtcaccgtggagatggagtgggagctcaagaaggaaaactccaagaggtggaacccagagatccagtacacaaacaactacaacgacccccagtttgtggactttgccccggacagcaccggggaatacagaaccaccagacctatcggaacccgataccttacccgacccctttaacccattcatgtcgcataccctcaataaa

SEQ ID NO: 1284 - protein, 724 aa, Artificial Sequence
  Synthetic polypeptide
MSFVDHPPDWLEEVGEGLREFLGLEAGPPKPKPNQQHQDQARGLVLPGYNYLGPGNGLDRGEPVNRADEVAREHDISYNEQLEAGDNPYLKYNHADAEFQEKLADDTSFGGNLGKAVFQAKKRVLEPFGLVEEGAKTAPTGKRIDDHFPKRKKARTEEDSKPSTSSDAEAGPSGSQQLQIPAQPASSLGADTMSAGGGGPLGDNNQGADGVGNASGDWHCDSTWMGDRVVTKSTRTWVLPSYNNHQYREIKSGSVDGSNANAYFGYSTPWGYFDFNRFHSHWSPRDWQRLINNYWGFRPRSLRVKIFNIQVKEVTVQDSTTTIANNLTSTVQVFTDDDYQLPYVVGNGTEGCLPAFPPQVFTLPQYGYATLNRDNTENPTERSSFFCLEYFPSKMLRTGNNFEFTYNFEEVPFHSSFAPSQNLFKLANPLVDQYLYRFVSTNNTGGVQFNKNLAGRYANTYKNWFPGPMGRTQGWNLGSGVNRASVSAFATTNRMELEGASYQVPPQPNGMTNNLQGSNTYALENTMIFNSQPANPGTTATYLEGNMLITSESETQPVNRVAYNVGGQMATNNQSSTTAPATGTVNLQEIVPGSVWMERDVYLQGPIWAKIPETGAHFHPSPAMGGFGLKHPPPMMLIKNTPVPGNITSFSDVPVSSFITQYSTGQVTVEMEWELKKENSKRWNPEIQYTNNYNDPQFVDFAPDSTGEYRTTRPIGTRYLTRPL

SEQ ID NO: 1285 - DNA, 2203 bp, Artificial Sequence
  Synthetic polynucleotide
atgtcttttgttgatcaccctccagattggttggaagaagttggtgaaggtcttcgcgagtttttgggccttgaagcgggcccaccgaaaccaaaacccaatcagcagcatcaagatcaagcccgtggtcttgtgctgcctggttataactatctcggacccggaaacggtctcgatcgaggagagcctgtcaacagggcagacgaggtcgcgcgagagcacgacatctcgtacaacgagcagcttgaggcgggagacaacccctacctcaagtacaaccacgcggacgccgagtttcaggagaagctcgccgacgacacatccttcgggggaaacctcggaaaggcagtctttcaggccaagaaaagggttctcgaaccttttggcctggttgaagagggtgctaagacggcccctaccggaaagcggatagacgaccactttccaaaaagaaagaaggctcggaccgaagaggactccaagccttccacctcgtcagacgccgaagctggacccagcggatcccagcagctgcaaatcccagcccaaccagcctcaagtttgggagctgatacaatgtctgcgggaggtggcggcccattgggcgacaataaccaaggtgccgatggagtgggcaatgcctcgggagattggcattgcgattccacgtggatgggggacagagtcgtcaccaagtccacccgaacctgggtgctgcccagctacaacaaccaccagtaccgagagatcaaaagcggctccgtcgacggaagcaacgccaacgcctactttggatacagcaccccctgggggtactttgactttaaccgcttccacagccactggagcccccgagactggcaaagactcatcaacaactactggggcttcagaccccggtccctcagagtcaaaatcttcaacattcaagtcaaagaggtcacggtgcaggactccaccaccaccatcgccaacaacctcacctccaccgtccaagtgtttacggacgacgactaccagctgccctacgtcgtcggcaacgggaccgagggatgcctgccggccttccctccgcaggtctttacgctgccgcagtacggttacgcgacgctgaaccgcgacaacacagaaaatcccaccgagaggagcagcttcttctgcctagagtactttcccagcaagatgctgagaacgggcaacaactttgagtttacctacaactttgaggaggtgcccttccactccagcttcgctcccagtcagaacctgttcaagctggccaacccgctggtggaccagtacttgtaccgcttcgtgagcacaaataacactggcggagtccagttcaacaagaacctggccgggagatacgccaacacctacaaaaactggttcccggggcccatgggccgaacccagggctggaacctgggctccggggtcaaccgcgccagtgtcagcgccttcgccacgaccaataggatggagctcgagggcgcgagttaccaggtgcccccgcagccgaacggcatgaccaacaacctccagggcagcaacacctatgccctggagaacactatgatcttcaacagccagccggcgaacccgggcaccaccgccacgtacctcgagggcaacatgctcatcaccagcgagagcgagacgcagccggtgaaccgcgtggcgtacaacgtcggcgggcagatggccaccaacaaccagagctccaccactgcccccgcgaccggcacgtacaacacccaggaaatcgtgcccggcagcgtgtggatggagagggacgtgtacctccaaggacccatctgggccaagatcccagagacgggggcgcactttcacccctctccggccatgggcggattcggactcaaacacccaccgcccatgatgctcatcaagaacacgcctgtgcccggaaatatcaccagcttctcggacgtgcccgtcagcagcttcatcacccagtacagcaccgggcaggtcaccgtggagatggagtgggagctcaagaaggaaaactccaagaggtggaacccagagatccagtacacaaacaactacaacgacccccagtttgtggactttgccccggacagcaccggggaatacagaaccaccagacctatcggaacccgataccttacccgacccctttaacccattcatgtcgcataccctcaataaa

SEQ ID NO: 1286 - protein, 724 aa, Artificial Sequence
  Synthetic polypeptide
MSFVDHPPDWLEEVGEGLREFLGLEAGPPKPKPNQQHQDQARGLVLPGYNYLGPGNGLDRGEPVNRADEVAREHDISYNEQLEAGDNPYLKYNHADAEFQEKLADDTSFGGNLGKAVFQAKKRVLEPFGLVEEGAKTAPTGKRIDDHFPKRKKARTEEDSKPSTSSDAEAGPSGSQQLQIPAQPASSLGADTMSAGGGGPLGDNNQGADGVGNASGDWHCDSTWMGDRVVTKSTRTWVLPSYNNHQYREIKSGSVDGSNANAYFGYSTPWGYFDFNRFHSHWSPRDWQRLINNYWGFRPRSLRVKIFNIQVKEVTVQDSTTTIANNLTSTVQVFTDDDYQLPYVVGNGTEGCLPAFPPQVFTLPQYGYATLNRDNTENPTERSSFFCLEYFPSKMLRTGNNFEFTYNFEEVPFHSSFAPSQNLFKLANPLVDQYLYRFVSTNNTGGVQFNKNLAGRYANTYKNWFPGPMGRTQGWNLGSGVNRASVSAFATTNRMELEGASYQVPPQPNGMTNNLQGSNTYALENTMIFNSQPANPGTTATYLEGNMLITSESETQPVNRVAYNVGGQMATNNQSSTTAPATGTYNTQEIVPGSVWMERDVYLQGPIWAKIPETGAHFHPSPAMGGFGLKHPPPMMLIKNTPVPGNITSFSDVPVSSFITQYSTGQVTVEMEWELKKENSKRWNPEIQYTNNYNDPQFVDFAPDSTGEYRTTRPIGTRYLTRPL

SEQ ID NO: 1287 - DNA, 2203 bp, Artificial Sequence
  Synthetic polynucleotide
atgtcttttgttgatcaccctccagattggttggaagaagttggtgaaggtcttcgcgagtttttgggccttgaagcgggcccaccgaaaccaaaacccaatcagcagcatcaagatcaagcccgtggtcttgtgctgcctggttataactatctcggacccggaaacggtctcgatcgaggagagcctgtcaacagggcagacgaggtcgcgcgagagcacgacatctcgtacaacgagcagcttgaggcgggagacaacccctacctcaagtacaaccacgcggacgccgagtttcaggagaagctcgccgacgacacatccttcgggggaaacctcggaaaggcagtctttcaggccaagaaaagggttctcgaaccttttggcctggttgaagagggtgctaagacggcccctaccggaaagcggatagacgaccactttccaaaaagaaagaaggctcggaccgaagaggactccaagccttccacctcgtcagacgccgaagctggacccagcggatcccagcagctgcaaatcccagcccaaccagcctcaagtttgggagctgatacaatgtctgcgggaggtggcggcccattgggcgacaataaccaaggtgccgatggagtgggcaatgcctcgggagattggcattgcgattccacgtggatgggggacagagtcgtcaccaagtccacccgaacctgggtgctgcccagctacaacaaccaccagtaccgagagatcaaaagcggctccgtcgacggaagcaacgccaacgcctactttggatacagcaccccctgggggtactttgactttaaccgcttccacagccactggagcccccgagactggcaaagactcatcaacaactactggggcttcagaccccggtccctcagagtcaaaatcttcaacattcaagtcaaagaggtcacggtgcaggactccaccaccaccatcgccaacaacctcacctccaccgtccaagtgtttacggacgacgactaccagctgccctacgtcgtcggcaacgggaccgagggatgcctgccggccttccctccgcaggtctttacgctgccgcagtacggttacgcgacgctgaaccgcgacaacacagaaaatcccaccgagaggagcagcttcttctgcctagagtactttcccagcaagatgctgagaacgggcaacaactttgagtttacctacaactttgaggaggtgcccttccactccagcttcgctcccagtcagaacctgttcaagctggccaacccgctggtggaccagtacttgtaccgcttcgtgagcacaaataacactggcggagtccagttcaacaagaacctggccgggagatacgccaacacctacaaaaactggttcccggggcccatgggccgaacccagggctggaacctgggctccggggtcaaccgcgccagtgtcagcgccttcgccacgaccaataggatggagctcgagggcgcgagttaccaggtgcccccgcagccgaacggcatgaccaacaacctccagggcagcaacacctatgccctggagaacactatgatcttcaacagccagccggcgaacccgggcaccaccgccacgtacctcgagggcaacatgctcatcaccagcgagagcgagacgcagccggtgaaccgcgtggcgtacaacgtcggcgggcagatggccaccaacaaccagagctccaccactgcccccgcgaccggcacggtcaacacccaggaaatcgtgcccggcagcgtgtggatggagagggacgtgtacctccaaggacccatctgggccaagatcccagagacgggggcgcactttcacccctctccggccatgggcggattcggactcaaacacccaccgcccatgatgctcatcaagaacacgcctgtgcccggaaatatcaccagcttctcggacgtgcccgtcagcagcttcatcacccagtacagcaccgggcaggtcaccgtggagatggagtgggagctcaagaaggaaaactccaagaggtggaacccagagatccagtacacaaacaactacaacgacccccagtttgtggactttgccccggacagcaccggggaatacagaaccaccagacctatcggaacccgataccttacccgacccctttaacccattcatgtcgcataccctcaataaa

SEQ ID NO: 1288 - protein, 724 aa, Artificial Sequence
  Synthetic polypeptide
MSFVDHPPDWLEEVGEGLREFLGLEAGPPKPKPNQQHQDQARGLVLPGYNYLGPGNGLDRGEPVNRADEVAREHDISYNEQLEAGDNPYLKYNHADAEFQEKLADDTSFGGNLGKAVFQAKKRVLEPFGLVEEGAKTAPTGKRIDDHFPKRKKARTEEDSKPSTSSDAEAGPSGSQQLQIPAQPASSLGADTMSAGGGGPLGDNNQGADGVGNASGDWHCDSTWMGDRVVTKSTRTWVLPSYNNHQYREIKSGSVDGSNANAYFGYSTPWGYFDFNRFHSHWSPRDWQRLINNYWGFRPRSLRVKIFNIQVKEVTVQDSTTTIANNLTSTVQVFTDDDYQLPYVVGNGTEGCLPAFPPQVFTLPQYGYATLNRDNTENPTERSSFFCLEYFPSKMLRTGNNFEFTYNFEEVPFHSSFAPSQNLFKLANPLVDQYLYRFVSTNNTGGVQFNKNLAGRYANTYKNWFPGPMGRTQGWNLGSGVNRASVSAFATTNRMELEGASYQVPPQPNGMTNNLQGSNTYALENTMIFNSQPANPGTTATYLEGNMLITSESETQPVNRVAYNVGGQMATNNQSSTTAPATGTVNTQEIVPGSVWMERDVYLQGPIWAKIPETGAHFHPSPAMGGFGLKHPPPMMLIKNTPVPGNITSFSDVPVSSFITQYSTGQVTVEMEWELKKENSKRWNPEIQYTNNYNDPQFVDFAPDSTGEYRTTRPIGTRYLTRPL

SEQ ID NO: 1289 - DNA, 2203 bp, Artificial Sequence
  Synthetic polynucleotide
atgtcttttgttgatcaccctccagattggttggaagaagttggtgaaggtcttcgcgagtttttgggccttgaagcgggcccaccgaaaccaaaacccaatcagcagcatcaagatcaagcccgtggtcttgtgctgcctggttataactatctcggacccggaaacggtctcgatcgaggagagcctgtcaacagggcagacgaggtcgcgcgagagcacgacatctcgtacaacgagcagcttgaggcgggagacaacccctacctcaagtacaaccacgcggacgccgagtttcaggagaagctcgccgacgacacatccttcgggggaaacctcggaaaggcagtctttcaggccaagaaaagggttctcgaaccttttggcctggttgaagagggtgctaagacggcccctaccggaaagcggatagacgaccactttccaaaaagaaagaaggctcggaccgaagaggactccaagccttccacctcgtcagacgccgaagctggacccagcggatcccagcagctgcaaatcccagcccaaccagcctcaagtttgggagctgatacaatgtctgcgggaggtggcggcccattgggcgacaataaccaaggtgccgatggagtgggcaatgcctcgggagattggcattgcgattccacgtggatgggggacagagtcgtcaccaagtccacccgaacctgggtgctgcccagctacaacaaccaccagtaccgagagatcaaaagcggctccgtcgacggaagcaacgccaacgcctactttggatacagcaccccctgggggtactttgactttaaccgcttccacagccactggagcccccgagactggcaaagactcatcaacaactactggggcttcagaccccggtccctcagagtcaaaatcttcaacattcaagtcaaagaggtcacggtgcaggactccaccaccaccatcgccaacaacctcacctccaccgtccaagtgtttacggacgacgactaccagctgccctacgtcgtcggcaacgggaccgagggatgcctgccggccttccctccgcaggtctttacgctgccgcagtacggttacgcgacgctgaaccgcgacaacacagaaaatcccaccgagaggagcagcttcttctgcctagagtactttcccagcaagatgctgagaacgggcaacaactttgagtttacctacaactttgaggaggtgcccttccactccagcttcgctcccagtcagaacctgttcaagctggccaacccgctggtggaccagtacttgtaccgcttcgtgagcacaaataacactggcggagtccagttcaacaagaacctggccgggagatacgccaacacctacaaaaactggttcccggggcccatgggccgaacccagggctggaacctgggctccggggtcaaccgcgccagtgtcagcgccttcgccacgaccaataggatggagctcgagggcgcgagttaccaggtgcccccgcagccgaacggcatgaccaacaacctccagggcagcaacacctatgccctggagaacactatgatcttcaacagccagccggcgaacccgggcaccaccgccacgtacctcgagggcaacatgctcatcaccagcgagagcgagacgcagccggtgaaccgcgtggcgtacaacgtcggcgggcagatggccaccaacaaccagagctccaccactgcccccgcgaccggcacgtacaacctccaggaaatcgtgcccggcagcgtgtggatggagagggacgtgtacctccaaggacccatctgggccaagatcccagagacgggggcgcactttcacccctctccggccatgggcggattcggactcaaacacccaccgcccatgatgctcatcaagaacacgcctgtgcccggaaatatcaccagcttctcggccgtgcccgtcagcagcttcatcacccagtacagcaccgggcaggtcaccgtggagatggagtgggagctcaagaaggaaaactccaagaggtggaacccagagatccagtacacaaacaactacaacgacccccagtttgtggactttgccccggacagcaccggggaatacagaaccaccagacctatcggaacccgataccttacccgacccctttaacccattcatgtcgcataccctcaataaa

SEQ ID NO: 1290 - protein, 724 aa, Artificial Sequence
  Synthetic polypeptide
MSFVDHPPDWLEEVGEGLREFLGLEAGPPKPKPNQQHQDQARGLVLPGYNYLGPGNGLDRGEPVNRADEVAREHDISYNEQLEAGDNPYLKYNHADAEFQEKLADDTSFGGNLGKAVFQAKKRVLEPFGLVEEGAKTAPTGKRIDDHFPKRKKARTEEDSKPSTSSDAEAGPSGSQQLQIPAQPASSLGADTMSAGGGGPLGDNNQGADGVGNASGDWHCDSTWMGDRVVTKSTRTWVLPSYNNHQYREIKSGSVDGSNANAYFGYSTPWGYFDFNRFHSHWSPRDWQRLINNYWGFRPRSLRVKIFNIQVKEVTVQDSTTTIANNLTSTVQVFTDDDYQLPYVVGNGTEGCLPAFPPQVFTLPQYGYATLNRDNTENPTERSSFFCLEYFPSKMLRTGNNFEFTYNFEEVPFHSSFAPSQNLFKLANPLVDQYLYRFVSTNNTGGVQFNKNLAGRYANTYKNWFPGPMGRTQGWNLGSGVNRASVSAFATTNRMELEGASYQVPPQPNGMTNNLQGSNTYALENTMIFNSQPANPGTTATYLEGNMLITSESETQPVNRVAYNVGGQMATNNQSSTTAPATGTYNLQEIVPGSVWMERDVYLQGPIWAKIPETGAHFHPSPAMGGFGLKHPPPMMLIKNTPVPGNITSFSAVPVSSFITQYSTGQVTVEMEWELKKENSKRWNPEIQYTNNYNDPQFVDFAPDSTGEYRTTRPIGTRYLTRPL

SEQ ID NO: 1291 - DNA, 2203 bp, Artificial Sequence
  Synthetic polynucleotide
atgtcttttgttgatcaccctccagattggttggaagaagttggtgaaggtcttcgcgagtttttgggccttgaagcgggcccaccgaaaccaaaacccaatcagcagcatcaagatcaagcccgtggtcttgtgctgcctggttataactatctcggacccggaaacggtctcgatcgaggagagcctgtcaacagggcagacgaggtcgcgcgagagcacgacatctcgtacaacgagcagcttgaggcgggagacaacccctacctcaagtacaaccacgcggacgccgagtttcaggagaagctcgccgacgacacatccttcgggggaaacctcggaaaggcagtctttcaggccaagaaaagggttctcgaaccttttggcctggttgaagagggtgctaagacggcccctaccggaaagcggatagacgaccactttccaaaaagaaagaaggctcggaccgaagaggactccaagccttccacctcgtcagacgccgaagctggacccagcggatcccagcagctgcaaatcccagcccaaccagcctcaagtttgggagctgatacaatgtctgcgggaggtggcggcccattgggcgacaataaccaaggtgccgatggagtgggcaatgcctcgggagattggcattgcgattccacgtggatgggggacagagtcgtcaccaagtccacccgaacctgggtgctgcccagctacaacaaccaccagtaccgagagatcaaaagcggctccgtcgacggaagcaacgccaacgcctactttggatacagcaccccctgggggtactttgactttaaccgcttccacagccactggagcccccgagactggcaaagactcatcaacaactactggggcttcagaccccggtccctcagagtcaaaatcttcaacattcaagtcaaagaggtcacggtgcaggactccaccaccaccatcgccaacaacctcacctccaccgtccaagtgtttatggacgacgactaccagctgccctacgtcgtcggcaacgggaccgagggatgcctgccggccttccctccgcaggtctttacgctgccgcagtacggttacgcgacgctgaaccgcgacaacacagaaaatcccaccgagaggagcagcttcttctgcctagagtactttcccagcaagatgctgagaacgggcaacaactttgagtttacctacaactttgaggaggtgcccttccactccagcttcgctcccagtcagaacctgttcaagctggccaacccgctggtggaccagtacttgtaccgcttcgtgagcacaaataacactggcggagtccagttcaacaagaacctggccgggagatacgccaacacctacaaaaactggttcccggggcccatgggccgaacccagggctggaacctgggctccggggtcaaccgcgccagtgtcagcgccttcgccacgaccaataggatggagctcgagggcgcgagttaccaggtgcccccgcagccgaacggcatgaccaacaacctccagggcagcaacacctatgccctggagaacactatgatcttcaacagccagccggcgaacccgggcaccaccgccacgtacctcgagggcaacatgctcatcaccagcgagagcgagacgcagccggtgaaccgcgtggcgtacaacgtcggcgggcagatggccaccaacaaccagagctccaccactgcccccgcgaccggcacgtacaacctccaggaaatcgtgcccggcagcgtgtggatggagagggacgtgtacctccaaggacccatctgggccaagatcccagagacgggggcgcactttcacccctctccggccatgggcggattcggactcaaacacccaccgcccatgatgctcatcaagaacacgcctgtgcccggaaatatcaccagcttctcggacgtgcccgtcagcagcttcatcacccagtacagcaccgggcaggtcaccgtggagatggagtgggagctcaagaaggaaaactccaagaggtggaacccagagatccagtacacaaacaactacaacgacccccagtttgtggactttgccccggacagcaccggggaatacagaaccaccagacctatcggaacccgataccttacccgacccctttaacccattcatgtcgcataccctcaataaa

SEQ ID NO: 1292 - protein, 724 aa, Artificial Sequence
  Synthetic polypeptide
MSFVDHPPDWLEEVGEGLREFLGLEAGPPKPKPNQQHQDQARGLVLPGYNYLGPGNGLDRGEPVNRADEVAREHDISYNEQLEAGDNPYLKYNHADAEFQEKLADDTSFGGNLGKAVFQAKKRVLEPFGLVEEGAKTAPTGKRIDDHFPKRKKARTEEDSKPSTSSDAEAGPSGSQQLQIPAQPASSLGADTMSAGGGGPLGDNNQGADGVGNASGDWHCDSTWMGDRVVTKSTRTWVLPSYNNHQYREIKSGSVDGSNANAYFGYSTPWGYFDFNRFHSHWSPRDWQRLINNYWGFRPRSLRVKIFNIQVKEVTVQDSTTTIANNLTSTVQVFMDDDYQLPYVVGNGTEGCLPAFPPQVFTLPQYGYATLNRDNTENPTERSSFFCLEYFPSKMLRTGNNFEFTYNFEEVPFHSSFAPSQNLFKLANPLVDQYLYRFVSTNNTGGVQFNKNLAGRYANTYKNWFPGPMGRTQGWNLGSGVNRASVSAFATTNRMELEGASYQVPPQPNGMTNNLQGSNTYALENTMIFNSQPANPGTTATYLEGNMLITSESETQPVNRVAYNVGGQMATNNQSSTTAPATGTYNLQEIVPGSVWMERDVYLQGPIWAKIPETGAHFHPSPAMGGFGLKHPPPMMLIKNTPVPGNITSFSDVPVSSFITQYSTGQVTVEMEWELKKENSKRWNPEIQYTNNYNDPQFVDFAPDSTGEYRTTRPIGTRYLTRPL

SEQ ID NO: 1293 - DNA, 2203 bp, Artificial Sequence
  Synthetic polynucleotide
atgtcttttgttgatcaccctccagattggttggaagaagttggtgaaggtcttcgcgagtttttgggccttgaagcgggcccaccgaaaccaaaacccaatcagcagcatcaagatcaagcccgtggtcttgtgctgcctggttataactatctcggacccggaaacggtctcgatcgaggagagcctgtcaacagggcagacgaggtcgcgcgagagcacgacatctcgtacaacgagcagcttgaggcgggagacaacccctacctcaagtacaaccacgcggacgccgagtttcaggagaagctcgccgacgacacatccttcgggggaaacctcggaaaggcagtctttcaggccaagaaaagggttctcgaaccttttggcctggttgaagagggtgctaagacggcccctaccggaaagcggatagacgaccactttccaaaaagaaagaaggctcggaccgaagaggactccaagccttccacctcgtcagacgccgaagctggacccagcggatcccagcagctgcaaatcccagcccaaccagcctcaagtttgggagctgatacaatgtctgcgggaggtggcggcccattgggcgacaataaccaaggtgccgatggagtgggcaatgcctcgggagattggcattgcgattccacgtggatgggggacagagtcgtcaccaagtccacccgaacctgggtgctgcccagctacaacaaccaccagtaccgagagatcaaaagcggctccgtcgacggaagcaacgccaacgcctactttggatacagcaccccctgggggtactttgactttaaccgcttccacagccactggagcccccgagactggcaaagactcatcaacaactactggggcttcagaccccggtccctcagagtcaaaatcttcaacattcaagtcaaagaggtcacggtgcaggactccaccaccaccatcgccaacaacctcacctccaccgtcgatgtgtttacggacgacgactaccagctgccctacgtcgtcggcaacgggaccgagggatgcctgccggccttccctccgcaggtctttacgctgccgcagtacggttacgcgacgctgaaccgcgacaacacagaaaatcccaccgagaggagcagcttcttctgcctagagtactttcccagcaagatgctgagaacgggcaacaactttgagtttacctacaactttgaggaggtgcccttccactccagcttcgctcccagtcagaacctgttcaagctggccaacccgctggtggaccagtacttgtaccgcttcgtgagcacaaataacactggcggagtccagttcaacaagaacctggccgggagatacgccaacacctacaaaaactggttcccggggcccatgggccgaacccagggctggaacctgggctccggggtcaaccgcgccagtgtcagcgccttcgccacgaccaataggatggagctcgagggcgcgagttaccaggtgcccccgcagccgaacggcatgaccaacaacctccagggcagcaacacctatgccctggagaacactatgatcttcaacagccagccggcgaacccgggcaccaccgccacgtacctcgagggcaacatgctcatcaccagcgagagcgagacgcagccggtgaaccgcgtggcgtacaacgtcggcgggcagatggccaccaacaaccagagctccaccactgcccccgcgaccggcacgtacaacctccaggaaatcgtgcccggcagcgtgtggatggagagggacgtgtacctccaaggacccatctgggccaagatcccagagacgggggcgcactttcacccctctccggccatgggcggattcggactcaaacacccaccgcccatgatgctcatcaagaacacgcctgtgcccggaaatatcaccagcttctcggacgtgcccgtcagcagcttcatcacccagtacagcaccgggcaggtcaccgtggagatggagtgggagctcaagaaggaaaactccaagaggtggaacccagagatccagtacacaaacaactacaacgacccccagtttgtggactttgccccggacagcaccggggaatacagaaccaccagacctatcggaacccgataccttacccgacccctttaacccattcatgtcgcataccctcaataaa

SEQ ID NO: 1294 - protein, 724 aa, Artificial Sequence
  Synthetic polypeptide
MSFVDHPPDWLEEVGEGLREFLGLEAGPPKPKPNQQHQDQARGLVLPGYNYLGPGNGLDRGEPVNRADEVAREHDISYNEQLEAGDNPYLKYNHADAEFQEKLADDTSFGGNLGKAVFQAKKRVLEPFGLVEEGAKTAPTGKRIDDHFPKRKKARTEEDSKPSTSSDAEAGPSGSQQLQIPAQPASSLGADTMSAGGGGPLGDNNQGADGVGNASGDWHCDSTWMGDRVVTKSTRTWVLPSYNNHQYREIKSGSVDGSNANAYFGYSTPWGYFDFNRFHSHWSPRDWQRLINNYWGFRPRSLRVKIFNIQVKEVTVQDSTTTIANNLTSTVDVFTDDDYQLPYVVGNGTEGCLPAFPPQVFTLPQYGYATLNRDNTENPTERSSFFCLEYFPSKMLRTGNNFEFTYNFEEVPFHSSFAPSQNLFKLANPLVDQYLYRFVSTNNTGGVQFNKNLAGRYANTYKNWFPGPMGRTQGWNLGSGVNRASVSAFATTNRMELEGASYQVPPQPNGMTNNLQGSNTYALENTMIFNSQPANPGTTATYLEGNMLITSESETQPVNRVAYNVGGQMATNNQSSTTAPATGTYNLQEIVPGSVWMERDVYLQGPIWAKIPETGAHFHPSPAMGGFGLKHPPPMMLIKNTPVPGNITSFSDVPVSSFITQYSTGQVTVEMEWELKKENSKRWNPEIQYTNNYNDPQFVDFAPDSTGEYRTTRPIGTRYLTRPL

SEQ ID NO: 1295 - DNA, 2203 bp, Artificial Sequence
  Synthetic polynucleotide
atgtcttttgttgatcaccctccagattggttggaagaagttggtgaaggtcttcgcgagtttttgggccttgaagcgggcccaccgaaaccaaaacccaatcagcagcatcaagatcaagcccgtggtcttgtgctgcctggttataactatctcggacccggaaacggtctcgatcgaggagagcctgtcaacagggcagacgaggtcgcgcgagagcacgacatctcgtacaacgagcagcttgaggcgggagacaacccctacctcaagtacaaccacgcggacgccgagtttcaggagaagctcgccgacgacacatccttcgggggaaacctcggaaaggcagtctttcaggccaagaaaagggttctcgaaccttttggcctggttgaagagggtgctaagacggcccctaccggaaagcggatagacgaccactttccaaaaagaaagaaggctcggaccgaagaggactccaagccttccacctcgtcagacgccgaagctggacccagcggatcccagcagctgcaaatcccagcccaaccagcctcaagtttgggagctgatacaatgtctgcgggaggtggcggcccattgggcgacaataaccaaggtgccgatggagtgggcaatgcctcgggagattggcattgcgattccacgtggatgggggacagagtcgtcaccaagtccacccgaacctgggtgctgcccagctacaacaaccaccagtaccgagagatcaaaagcggctccgtcgacggaagcaacgccaacgcctactttggatacagcaccccctgggggtactttgactttaaccgcttccacagccactggagcccccgagactggcaaagactcatcaacaactactggggcttcagaccccggtccctcagagtcaaaatcttcaacattcaagtcaaagaggtcacggtgcaggactccaccaccaccatcgccaacaacctcacctccaccgtccaagtgtttacggacgacgactaccagctgccctacgtcgtcggcaacgggacccagggatgcctgccggccttccctccgcaggtctttacgctgccgcagtacggttacgcgacgctgaaccgcgacaacacagaaaatcccaccgagaggagcagcttcttctgcctagagtactttcccagcaagatgctgagaacgggcaacaactttgagtttacctacaactttgaggaggtgcccttccactccagcttcgctcccagtcagaacctgttcaagctggccaacccgctggtggaccagtacttgtaccgcttcgtgagcacaaataacactggcggagtccagttcaacaagaacctggccgggagatacgccaacacctacaaaaactggttcccggggcccatgggccgaacccagggctggaacctgggctccggggtcaaccgcgccagtgtcagcgccttcgccacgaccaataggatggagctcgagggcgcgagttaccaggtgcccccgcagccgaacggcatgaccaacaacctccagggcagcaacacctatgccctggagaacactatgatcttcaacagccagccggcgaacccgggcaccaccgccacgtacctcgagggcaacatgctcatcaccagcgagagcgagacgcagccggtgaaccgcgtggcgtacaacgtcggcgggcagatggccaccaacaaccagagctccaccactgcccccgcgaccggcacgtacaacctccaggaaatcgtgcccggcagcgtgtggatggagagggacgtgtacctccaaggacccatctgggccaagatcccagagacgggggcgcactttcacccctctccggccatgggcggattcggactcaaacacccaccgcccatgatgctcatcaagaacacgcctgtgcccggaaatatcaccagcttctcggacgtgcccgtcagcagcttcatcacccagtacagcaccgggcaggtcaccgtggagatggagtgggagctcaagaaggaaaactccaagaggtggaacccagagatccagtacacaaacaactacaacgacccccagtttgtggactttgccccggacagcaccggggaatacagaaccaccagacctatcggaacccgataccttacccgacccctttaacccattcatgtcgcataccctcaataaa

SEQ ID NO: 1296 - protein, 724 aa, Artificial Sequence
  Synthetic polypeptide
MSFVDHPPDWLEEVGEGLREFLGLEAGPPKPKPNQQHQDQARGLVLPGYNYLGPGNGLDRGEPVNRADEVAREHDISYNEQLEAGDNPYLKYNHADAEFQEKLADDTSFGGNLGKAVFQAKKRVLEPFGLVEEGAKTAPTGKRIDDHFPKRKKARTEEDSKPSTSSDAEAGPSGSQQLQIPAQPASSLGADTMSAGGGGPLGDNNQGADGVGNASGDWHCDSTWMGDRVVTKSTRTWVLPSYNNHQYREIKSGSVDGSNANAYFGYSTPWGYFDFNRFHSHWSPRDWQRLINNYWGFRPRSLRVKIFNIQVKEVTVQDSTTTIANNLTSTVQVFTDDDYQLPYVVGNGTQGCLPAFPPQVFTLPQYGYATLNRDNTENPTERSSFFCLEYFPSKMLRTGNNFEFTYNFEEVPFHSSFAPSQNLFKLANPLVDQYLYRFVSTNNTGGVQFNKNLAGRYANTYKNWFPGPMGRTQGWNLGSGVNRASVSAFATTNRMELEGASYQVPPQPNGMTNNLQGSNTYALENTMIFNSQPANPGTTATYLEGNMLITSESETQPVNRVAYNVGGQMATNNQSSTTAPATGTYNLQEIVPGSVWMERDVYLQGPIWAKIPETGAHFHPSPAMGGFGLKHPPPMMLIKNTPVPGNITSFSDVPVSSFITQYSTGQVTVEMEWELKKENSKRWNPEIQYTNNYNDPQFVDFAPDSTGEYRTTRPIGTRYLTRPL

SEQ ID NO: 1297 - DNA, 2203 bp, Artificial Sequence
  Synthetic polynucleotide
atgtcttttgttgatcaccctccagattggttggaagaagttggtgaaggtcttcgcgagtttttgggccttgaagcgggcccaccgaaaccaaaacccaatcagcagcatcaagatcaagcccgtggtcttgtgctgcctggttataactatctcggacccggaaacggtctcgatcgaggagagcctgtcaacagggcagacgaggtcgcgcgagagcacgacatctcgtacaacgagcagcttgaggcgggagacaacccctacctcaagtacaaccacgcggacgccgagtttcaggagaagctcgccgacgacacatccttcgggggaaacctcggaaaggcagtctttcaggccaagaaaagggttctcgaaccttttggcctggttgaagagggtgctaagacggcccctaccggaaagcggatagacgaccactttccaaaaagaaagaaggctcggaccgaagaggactccaagccttccacctcgtcagacgccgaagctggacccagcggatcccagcagctgcaaatcccagcccaaccagcctcaagtttgggagctgatacaatgtctgcgggaggtggcggcccattgggcgacaataaccaaggtgccgatggagtgggcaatgcctcgggagattggcattgcgattccacgtggatgggggacagagtcgtcaccaagtccacccgaacctgggtgctgcccagctacaacaaccaccagtaccgagagatcaaaagcggctccgtcgacggaagcaacgccaacgcctactttggatacagcaccccctgggggtactttgactttaaccgcttccacagccactggagcccccgagactggcaaagactcatcaacaactactggggcttcagaccccggtccctcagagtcaaaatcttcaacattcaagtcaaagaggtcacggtgcaggactccaccaccaccatcgccaacaacctcacctccaccgtccaagtgtttacggacgacgactaccagctgccctacgtcgtcggcaacgggaccgagggatgcctgccggccttccctccgcaggtctttacgctgccgcagtacggttacgcgacgctgaaccgcgacaacacagaaaatcccaccgagaggagcagcttcttctgcctagagtactttcccagcaagatgctgagaacgggcaacaactttgagtttacctacaactttgaggaggtgcccttccactccagcttcgctcccagtcagaacctgttcaagctggccaacccgctggtggaccagtacttgtaccgcttcgtgagcacaaataacactggcggagtccagttcaacaagaacctggccgggagatacgccaacacctacaaaaactggttcccggggcccatgggccgaacccagggctggaacctgggctccggggtcaaccgcgccagtgtcagcgccttcgccacgaccaataggatggagctcgagggcgcgagttaccaggtgcccccgcagccgaacggcatgaccaacaacctccagggcagcaacacctatgccctggagaacactatgatcttcaacagccagtcggcgaacccgggcaccaccgccacgtacctcgagggcaacatgctcatcaccagcgagagcgagacgcagccggtgaaccgcgtggcgtacaacgtcggcgggcagatggccaccaacaaccagagctccaccactgcccccgcgaccggcacgtacaacctccaggaaatcgtgcccggcagcgtgtggatggagagggacgtgtacctccaaggacccatctgggccaagatcccagagacgggggcgcactttcacccctctccggccatgggcggattcggactcaaacacccaccgcccatgatgctcatcaagaacacgcctgtgcccggaaatatcaccagcttctcggacgtgcccgtcagcagcttcatcacccagtacagcaccgggcaggtcaccgtggagatggagtgggagctcaagaaggaaaactccaagaggtggaacccagagatccagtacacaaacaactacaacgacccccagtttgtggactttgccccggacagcaccggggaatacagaaccaccagacctatcggaacccgataccttacccgacccctttaacccattcatgtcgcataccctcaataaa

SEQ ID NO: 1298 - protein, 724 aa, Artificial Sequence
  Synthetic polypeptide
MSFVDHPPDWLEEVGEGLREFLGLEAGPPKPKPNQQHQDQARGLVLPGYNYLGPGNGLDRGEPVNRADEVAREHDISYNEQLEAGDNPYLKYNHADAEFQEKLADDTSFGGNLGKAVFQAKKRVLEPFGLVEEGAKTAPTGKRIDDHFPKRKKARTEEDSKPSTSSDAEAGPSGSQQLQIPAQPASSLGADTMSAGGGGPLGDNNQGADGVGNASGDWHCDSTWMGDRVVTKSTRTWVLPSYNNHQYREIKSGSVDGSNANAYFGYSTPWGYFDFNRFHSHWSPRDWQRLINNYWGFRPRSLRVKIFNIQVKEVTVQDSTTTIANNLTSTVQVFTDDDYQLPYVVGNGTEGCLPAFPPQVFTLPQYGYATLNRDNTENPTERSSFFCLEYFPSKMLRTGNNFEFTYNFEEVPFHSSFAPSQNLFKLANPLVDQYLYRFVSTNNTGGVQFNKNLAGRYANTYKNWFPGPMGRTQGWNLGSGVNRASVSAFATTNRMELEGASYQVPPQPNGMTNNLQGSNTYALENTMIFNSQSANPGTTATYLEGNMLITSESETQPVNRVAYNVGGQMATNNQSSTTAPATGTYNLQEIVPGSVWMERDVYLQGPIWAKIPETGAHFHPSPAMGGFGLKHPPPMMLIKNTPVPGNITSFSDVPVSSFITQYSTGQVTVEMEWELKKENSKRWNPEIQYTNNYNDPQFVDFAPDSTGEYRTTRPIGTRYLTRPL

SEQ ID NO: 1299 - DNA, 2203 bp, Artificial Sequence
  Synthetic polynucleotide
atgtcttttgttgatcaccctccagattggttggaagaagttggtgaaggtcttcgcgagtttttgggccttgaagcgggcccaccgaaaccaaaacccaatcagcagcatcaagatcaagcccgtggtcttgtgctgcctggttataactatctcggacccggaaacggtctcgatcgaggagagcctgtcaacagggcagacgaggtcgcgcgagagcacgacatctcgtacaacgagcagcttgaggcgggagacaacccctacctcaagtacaaccacgcggacgccgagtttcaggagaagctcgccgacgacacatccttcgggggaaacctcggaaaggcagtctttcaggccaagaaaagggttctcgaaccttttggcctggttgaagagggtgctaagacggcccctaccggaaagcggatagacgaccactttccaaaaagaaagaaggctcggaccgaagaggactccaagccttccacctcgtcagacgccgaagctggacccagcggatcccagcagctgcaaatcccagcccaaccagcctcaagtttgggagctgatacaatgtctgcgggaggtggcggcccattgggcgacaataaccaaggtgccgatggagtgggcaatgcctcgggagattggcattgcgattccacgtggatgggggacagagtcgtcaccaagtccacccgaacctgggtgctgcccagctacaacaaccaccagtaccgagagatcaaaagcggctccgtcgacggaagcaacgccaacgcctactttggatacagcaccccctgggggtactttgactttaaccgcttccacagccactggagcccccgagactggcaaagactcatcaacaactactggggcttcagaccccggtccctcagagtcaaaatcttcaacattcaagtcaaagaggtcacggtgcaggactccaccaccaccatcgccaacaacctcacctccaccgtccaagtgtttacggacgacgactaccagctgccctacgtcgtcggcaacgggaccgagggatgcctgccggccttccctccgcaggtctttacgctgccgcagtacggttacgcgacgctgaaccgcgacaacacagaaaatcccaccgagaggagcagcttcttctgcctagagtactttcccagcaagatgctgagaacgggcaacaactttgagtttacctacaactttgaggaggtgcccttccactccagcttcgctcccagtcagaacctgttcaagctggccaacccgctggtggaccagtacttgtaccgcttcgtgagcacaaataacactggcggagtccagttcaacaagaacctggccgggagatacgccaacacctacaaaaactggttcccggggcccatgggccgaacccagggctggaacctgggctccggggtcaaccgcgccagtgtcagcgccttcgccacgaccaataggatggagctcgagggcgcgagttaccaggtgcccccgcagccgaacggcatgaccaacaacctccagggcagcaacacctatgccctggagaacactatgatcttcaacagccagggggcgaacccgggcaccaccgccacgtacctcgagggcaacatgctcatcaccagcgagagcgagacgcagccggtgaaccgcgtggcgtacaacgtcggcgggcagatggccaccaacaaccagagctccaccactgcccccgcgaccggcacgtacaacctccaggaaatcgtgcccggcagcgtgtggatggagagggacgtgtacctccaaggacccatctgggccaagatcccagagacgggggcgcactttcacccctctccggccatgggcggattcggactcaaacacccaccgcccatgatgctcatcaagaacacgcctgtgcccggaaatatcaccagcttctcggacgtgcccgtcagcagcttcatcacccagtacagcaccgggcaggtcaccgtggagatggagtgggagctcaagaaggaaaactccaagaggtggaacccagagatccagtacacaaacaactacaacgacccccagtttgtggactttgccccggacagcaccggggaatacagaaccaccagacctatcggaacccgataccttacccgacccctttaacccattcatgtcgcataccctcaataaa

SEQ ID NO: 1300 - protein, 724 aa, Artificial Sequence
  Synthetic polypeptide
MSFVDHPPDWLEEVGEGLREFLGLEAGPPKPKPNQQHQDQARGLVLPGYNYLGPGNGLDRGEPVNRADEVAREHDISYNEQLEAGDNPYLKYNHADAEFQEKLADDTSFGGNLGKAVFQAKKRVLEPFGLVEEGAKTAPTGKRIDDHFPKRKKARTEEDSKPSTSSDAEAGPSGSQQLQIPAQPASSLGADTMSAGGGGPLGDNNQGADGVGNASGDWHCDSTWMGDRVVTKSTRTWVLPSYNNHQYREIKSGSVDGSNANAYFGYSTPWGYFDFNRFHSHWSPRDWQRLINNYWGFRPRSLRVKIFNIQVKEVTVQDSTTTIANNLTSTVQVFTDDDYQLPYVVGNGTEGCLPAFPPQVFTLPQYGYATLNRDNTENPTERSSFFCLEYFPSKMLRTGNNFEFTYNFEEVPFHSSFAPSQNLFKLANPLVDQYLYRFVSTNNTGGVQFNKNLAGRYANTYKNWFPGPMGRTQGWNLGSGVNRASVSAFATTNRMELEGASYQVPPQPNGMTNNLQGSNTYALENTMIFNSQGANPGTTATYLEGNMLITSESETQPVNRVAYNVGGQMATNNQSSTTAPATGTYNLQEIVPGSVWMERDVYLQGPIWAKIPETGAHFHPSPAMGGFGLKHPPPMMLIKNTPVPGNITSFSDVPVSSFITQYSTGQVTVEMEWELKKENSKRWNPEIQYTNNYNDPQFVDFAPDSTGEYRTTRPIGTRYLTRPL

SEQ ID NO: 1301 - DNA, 2194 bp, Artificial Sequence
  Synthetic polynucleotide
atgtcttttgttgatcaccctccagattggttggaagaagttggtgaaggtcttcgcgagtttttgggccttgaagcgggcccaccgaaaccaaaacccaatcagcagcatcaagatcaagcccgtggtcttgtgctgcctggttataactatctcggacccggaaacggtctcgatcgaggagagcctgtcaacagggcagacgaggtcgcgcgagagcacgacatctcgtacaacgagcagcttgaggcgggagacaacccctacctcaagtacaaccacgcggacgccgagtttcaggagaagctcgccgacgacacatccttcgggggaaacctcggaaaggcagtctttcaggccaagaaaagggttctcgaaccttttggcctggttgaagagggtgctaagacggcccctaccggaaagcggatagacgaccactttccaaaaagaaagaaggctcggaccgaagaggactccaagccttccacctcgtcagacgccgaagctggacccagcggatcccagcagctgcaaatcccagcccaaccagcctcaagtttgggagctgatacaatgtctgcgggaggtggcggcccattgggcgacaataaccaaggtgccgatggagtgggcaatgcctcgggagattggcattgcgattccacgtggatgggggacagagtcgtcaccaagtccacccgaacctgggtgctgcccagctacaacaaccaccagtaccgagagatcaaaagcggctccgtcgacggaagcaacgccaacgcctactttggatacagcaccccctgggggtactttgactttaaccgcttccacagccactggagcccccgagactggcaaagactcatcaacaactactggggcttcagaccccggtccctcagagtcaaaatcttcaacattcaagtcaaagaggtcacggtgcaggactccaccaccaccatcgccaacaacctcacctccaccgtccaagtgtttacggacgacgactaccagctgccctacgtcgtcggcaacgggaccgagggatgcctgccggccttccctccgcaggtctttacgctgccgcagtacggttacgcgacgctgaaccgcgacaacacagaaaatcccaccgagaggagcagcttcttctgcctagagtactttcccagcaagatgctgagaacgggcaacaactttgagtttacctacaactttgaggaggtgcccttccactccagcttcgctcccagtcagaacctgttcaagctggccaacccgctggtggaccagtacttgtaccgcttcgtgagcacaaataacactggcggagtccagttcaacaagaacctggccgggagatacgccaacacctacaaaaactggttcccggggcccatgggccgaacccagggctggaacctgggctccggggtcaaccgcgccagtgtcagcgccttcgccacgaccaataggatggagctcgagggcgcgagttaccaggtgcccccgcagccgaacggcatgaccaacaacctccagggcagcaacacctatgccctggagaacactatgatcttcgggaagcaaggctcagagaaaacaaatgtggacattgaaaaggtcatgatcaccagcgagagcgagacgcagccggtgaaccgcgtggcgtacaacgtcggcgggcagatggccaccaacaaccagagctccaccactgcccccgcgaccggcacgtacaacctccaggaaatcgtgcccggcagcgtgtggatggagagggacgtgtacctccaaggacccatctgggccaagatcccagagacgggggcgcactttcacccctctccggccatgggcggattcggactcaaacacccaccgcccatgatgctcatcaagaacacgcctgtgcccggaaatatcaccagcttctcggacgtgcccgtcagcagcttcatcacccagtacagcaccgggcaggtcaccgtggagatggagtgggagctcaagaaggaaaactccaagaggtggaacccagagatccagtacacaaacaactacaacgacccccagtttgtggactttgccccggacagcaccggggaatacagaaccaccagacctatcggaacccgataccttacccgacccctttaacccattcatgtcgcataccctcaataaa

SEQ ID NO: 1302 - protein, 721 aa, Artificial Sequence
  Synthetic polypeptide
MSFVDHPPDWLEEVGEGLREFLGLEAGPPKPKPNQQHQDQARGLVLPGYNYLGPGNGLDRGEPVNRADEVAREHDISYNEQLEAGDNPYLKYNHADAEFQEKLADDTSFGGNLGKAVFQAKKRVLEPFGLVEEGAKTAPTGKRIDDHFPKRKKARTEEDSKPSTSSDAEAGPSGSQQLQIPAQPASSLGADTMSAGGGGPLGDNNQGADGVGNASGDWHCDSTWMGDRVVTKSTRTWVLPSYNNHQYREIKSGSVDGSNANAYFGYSTPWGYFDFNRFHSHWSPRDWQRLINNYWGFRPRSLRVKIFNIQVKEVTVQDSTTTIANNLTSTVQVFTDDDYQLPYVVGNGTEGCLPAFPPQVFTLPQYGYATLNRDNTENPTERSSFFCLEYFPSKMLRTGNNFEFTYNFEEVPFHSSFAPSQNLFKLANPLVDQYLYRFVSTNNTGGVQFNKNLAGRYANTYKNWFPGPMGRTQGWNLGSGVNRASVSAFATTNRMELEGASYQVPPQPNGMTNNLQGSNTYALENTMIFGKQGSEKTNVDIEKVMITSESETQPVNRVAYNVGGQMATNNQSSTTAPATGTYNLQEIVPGSVWMERDVYLQGPIWAKIPETGAHFHPSPAMGGFGLKHPPPMMLIKNTPVPGNITSFSDVPVSSFITQYSTGQVTVEMEWELKKENSKRWNPEIQYTNNYNDPQFVDFAPDSTGEYRTTRPIGTRYLTRPL

SEQ ID NO: 1303 - protein, 519 aa, Artificial Sequence
  Synthetic polypeptide
DGVGSSSGNWHCDSTWLGDRVITTSTRTWALPTYNNHLYKQISNGTSGGATNDNTYFGYSTPWGYFDFNRFHCHFSPRDWQRLINNNWGFRPKRLSFKLFNIQVKEVTQNEGTKTIANNLTSTIQVFTDSEYQLPYVLGSAHQGCLPPFPADVFMIPQYGYLTLNNGSQAVGRSSFYCLEYFPSQMLRTGNNFQFTYTFEDVPFHSSYAHSQSLDRLMNPLIDQYLYYLSRTQTTGGTANTQTLGFSQGGPNTMANQAKNWLPGPCYRQQRVSTTTGQNNNSNFAWTAGTKYHLNGRNSLANPGIAMATHKDDEERFFPSNGILIFGKQNAARDNADYSDVMLTSEEEIKTTNPVATEEYGIVADNLQQQNTAPQIGTVNSQGALPGMVWQNRDVYLQGPIWAKIPHTDGNFHPSPLMGGFGLKHPPPQILIKNTPVPADPPTTFNQSKLNSFITQYSTGQVSVEIEWELQKENSKRWNPEIQYTSNYYKSTSVDFAVNTEGVYSEPRPIGTRYLTRNL

SEQ ID NO: 1304 - protein, 738 aa, Artificial Sequence
  Synthetic polypeptide
MAADGYLPDWLEDNLSEGIREWWALQPGAPKPKANQQHQDNARGLVLPGYKYLGPGNGLDKGEPVNAADAAALEHDKAYDQQLKAGDNPYLKYNHADAEFQERLKEDTSFGGNLGRAVFQAKKRLLEPLGLVEEAAKTAPGKKRPVEPSPQRSPDSSTGIGKKGQQPARKRLNFGQTGDSESVPDPQPLGEPPAAPSGVGPNTMAAGGGAPMADNNEGADGVGSSSGNWHCDSTWLGDRVITTSTRTWALPTYNNHLYKQISNGTSGGATNDNTYFGYSTPWGYFDFNRFHCHFSPRDWQRLINNNWGFRPKRLSFKLFNIQVKEVTQNEGTKTIANNLTSTIQVFTDSEYQLPYVLGSAHQGCLPPFPADVFMIPQYGYLTLNNGSQAVGRSSFYCLEYFPSQMLRTGNNFQFTYTFEDVPFHSSYAHSQSLDRLMNPLIDQYLYYLSRTQTTGGTANTQTLGFSQGGPNTMANQAKNWLPGPCYRQQRVSTTTGQNNNSNFAWTAGTKYHLNGRNSLANPGIAMATHKDDEERFFPSNGILIFGKQNAARDNADYSDVMLTSEEEIKTTNPVATEEYGIVADNLQQQNTAPQIGTVNSQGALPGMVWQNRDVYLQGPIWAKIPHTDGNFHPSPLMGGFGLKHPPPQILIKNTPVPADPPTTFNQSKLNSFITQYSTGQVSVEIEWELQKENSKRWNPEIQYTSNYYKSTSVDFAVNTEGVYSEPRPIGTRYLTRNL

SEQ ID NO: 1305 - protein, 725 aa, Artificial Sequence
  Synthetic polypeptide
MAADGYLPDWLEDNLSEGIREWWALQPGAPKPKANQQHQDNARGLVLPGYKYLGPGNGLDKGEPVNAADAAALEHDKAYDQQLKAGDNPYLKYNHADAEFQERLKEDTSFGGNLGRAVFQAKKRLLEPLGLVEEAAKTAPTGKRIDDHFPKRKKARTEEDSKPSTSSDAEAGPSGSQQLQIPAQPASSLGADTMSAGGGGPLGDNNQGADGVGNASGDWHCDSTWMGDRVVTKSTRTWVLPSYNNHQYREIKSGSVDGSNANAYFGYSTPWGYFDFNRFHSHWSPRDWQRLINNYWGFRPRSLRVKIFNIQVKEVTVQDSTTTIANNLTSTVQVFTDDDYQLPYVVGNGTEGCLPAFPPQVFTLPQYGYATLNRDNTENPTERSSFFCLEYFPSKMLRTGNNFEFTYNFEEVPFHSSFAPSQNLFKLANPLVDQYLYRFVSTNNTGGVQFNKNLAGRYANTYKNWFPGPMGRTQGWNLGSGVNRASVSAFATTNRMELEGASYQVPPQPNGMTNNLQGSNTYALENTMIFNSQPANPGTTATYLEGNMLITSESETQPVNRVAYNVGGQMATNNQSSTTAPATGTYNLQEIVPGSVWMERDVYLQGPIWAKIPETGAHFHPSPAMGGFGLKHPPPMMLIKNTPVPGNITSFSDVPVSSFITQYSTGQVTVEMEWELKKENSKRWNPEIQYTNNYNDPQFVDFAPDSTGEYRTTRPIGTRYLTRPL

SEQ ID NO: 1306 - protein, 736 aa, Artificial Sequence
  Synthetic polypeptide
MAADGYLPDWLEDNLSEGIREWWALKPGAPKPKANQQKQDDGRGLVLPGYKYLGPFNGLDKGEPVNAADAAALEHDKAYDQQLQAGDNPYLRYNHADAEFQERLQEDTSFGGNLGRAVFQAKKRVLEPLGLVEEGAKTAPGKKRPVDQSPQEPDSSSGVGKSGKQPARKRLNFGQTGDSESVPDPQPLGEPPAAPTSLGSNTMASGGGAPMADNNEGADGVGNSSGNWHCDSQWLGDRVITTSTRTWALPTYNNHLYKQISSQSGASNDNHYFGYSTPWGYFDFNRFHCHFSPRDWQRLINNNWGFRPKKLSFKLFNIQVKEVTQNDGTTTIANNLTSTVQVFTDSEYQLPYVLGSAHQGCLPPFPADVFMVPQYGYLTLNNGSQAVGRSSFYCLEYFPSQMLRTGNNFQFSYTFEDVPFHSSYAHSQSLDRLMNPLIDQYLYYLNRTQGTTSGTTNQSRLLFSQAGPQSMSLQARNWLPGPCYRQQRLSKTANDNNNSNFPWTAASKYHLNGRDSLVNPGPAMASHKDDEEKFFPMHGNLIFGKEGTTASNAELDNVMITDEEEIRTTNPVATEQYGTVANNLQSSNTAPTTRTVNDQGALPGMVWQDRDVYLQGPIWAKIPHTDGHFHPSPLMGGFGLKHPPPQIMIKNTPVPANPPTTFSPAKFASFITQYSTGQVSVEIEWELQKENSKRWNPEIQYTSNYNKSVNVDFTVDTNGVYSEPRPIGTRYLTRNL

SEQ ID NO: 1307 - protein, 735 aa, Artificial Sequence
  Synthetic polypeptide
MSFVDHPPDWLEEVGEGLREFLGLEAGPPKPKPNQQHQDQARGLVLPGYNYLGPGNGLDRGEPVNRADEVAREHDISYNEQLEAGDNPYLKYNHADAEFQEKLADDTSFGGNLGKAVFQAKKRVLEPFGLVEEGAKTAPGKKRPVDQSPQEPDSSSGVGKSGKQPARKRLNFGQTGDSESVPDPQPLGEPPAAPTSLGSNTMASGGGAPMADNNEGADGVGNSSGNWHCDSQWLGDRVITTSTRTWALPTYNNHLYKQISSQSGASNDNHYFGYSTPWGYFDFNRFHCHFSPRDWQRLINNNWGFRPKKLSFKLFNIQVKEVTQNDGTTTIANNLTSTVQVFTDSEYQLPYVLGSAHQGCLPPFPADVFMVPQYGYLTLNNGSQAVGRSSFYCLEYFPSQMLRTGNNFQFSYTFEDVPFHSSYAHSQSLDRLMNPLIDQYLYYLNRTQGTTSGTTNQSRLLFSQAGPQSMSLQARNWLPGPCYRQQRLSKTANDNNNSNFPWTAASKYHLNGRDSLVNPGPAMASHKDDEEKFFPMHGNLIFGKEGTTASNAELDNVMITDEEEIRTTNPVATEQYGTVANNLQSSNTAPTTRTVNDQGALPGMVWQDRDVYLQGPIWAKIPHTDGHFHPSPLMGGFGLKHPPPQIMIKNTPVPANPPTTFSPAKFASFITQYSTGQVSVEIEWELQKENSKRWNPEIQYTSNYNKSVNVDFTVDTNGVYSEPRPIGTRYLTRPL

SEQ ID NO: 1308 - protein, 736 aa, Artificial Sequence
  Synthetic polypeptide
MAADGYLPDWLEDNLSEGIREWWALKPGAPKPKANQQKQDDGRGLVLPGYKYLGPFNGLDKGEPVNAADAAALEHDKAYDQQLQAGDNPYLRYNHADAEFQERLQEDTSFGGNLGRAVFQAKKRVLEPLGLVEEGAKTAPGKKRPVEPSPQRSPDSSTGIGKKGQQPARKRLNFGQTGDSESVPDPQPLGEPPAAPSGVGPNTMAAGGGAPMADNNEGADGVGSSSGNWHCDSTWLGDRVITTSTRTWALPTYNNHLYKQISSQSGASNDNHYFGYSTPWGYFDFNRFHCHFSPRDWQRLINNNWGFRPKRLSFKLFNIQVKEVTQNEGTKTIANNLTSTIQVFTDSEYQLPYVLGSAHQGCLPPFPADVFMIPQYGYLTLNNGSQAVGRSSFYCLEYFPSQMLRTGNNFQFTYTFEDVPFHSSYAHSQSLDRLMNPLIDQYLYYLSRTQTTGGTANTQTLGFSQGGPNTMANQAKNWLPGPCYRQQRVSTTTGQNNNSNFAWTAGTKYHLNGRNSLANPGIAMATHKDDEERFFPSNGILIFGKQGTTASNAELDNVMITDEEEIKTTNPVATEEYGIVADNLQQQNTAPQIGTVNSQGALPGMVWQNRDVYLQGPIWAKIPHTDGNFHPSPLMGGFGLKHPPPQILIKNTPVPADPPTTFNQSKLNSFITQYSTGQVSVEIEWELQKENSKRWNPEIQYTSNYNKSVNVDFTVDTNGVYSEPRPIGTRYLTRNL

SEQ ID NO: 1309 - protein, 736 aa, Artificial Sequence
  Synthetic polypeptide
MAADGYLPDWLEDNLSEGIREWWALKPGAPKPKANQQKQDDGRGLVLPGYKYLGPFNGLDKGEPVNAADAAALEHDKAYDQQLQAGDNPYLRYNHADAEFQERLQEDTSFGGNLGRAVFQAKKRVLEPLGLVEEGAKTAPGKKRPVEPSPQRSPDSSTGIGKKGQQPARKRLNFGQTGDSESVPDPQPLGEPPAAPSGVGPNTMAAGGGAPMADNNEGADGVGSSSGNWHCDSTWLGDRVITTSTRTWALPTYNNHLYKQISSQSGASNDNHYFGYSTPWGYFDFNRFHCHFSPRDWQRLINNNWGFRPKRLSFKLFNIQVKEVTQNEGTKTIANNLTSTIQVFTDSEYQLPYVLGSAHQGCLPPFPADVFMIPQYGYLTLNNGSQAVGRSSFYCLEYFPSQMLRTGNNFQFTYTFEDVPFHSSYAHSQSLDRLMNPLIDQYLYYLSRTQTTGGTANTQTLGFSQGGPNTMANQAKNWLPGPCYRQQRVSTTTGQNNNSNFAWTAGTKYHLNGRNSLANPGIAMATHKDDEERFFPSNGILIFGKQNAARDNADYSDVMLTSEEEIKTTNPVATEEYGIVADNLQQQNTAPQIGTVNSQGALPGMVWQNRDVYLQGPIWAKIPHTDGNFHPSPLMGGFGLKHPPPQILIKNTPVPADPPTTFNQSKLNSFITQYSTGQVSVEIEWELQKENSKRWNPEIQYTSNYYKSTSVDFAVNTEGVYSEPRPIGTRYLTRNL

SEQ ID NO: 1310 - protein, 736 aa, Artificial Sequence
  Synthetic polypeptide
MAADGYLPDWLEDNLSEGIREWWDLKPGAPKPKANQQKQDDGRGLVLPGYKYLGPFNGLDKGEPVNAADAAALEHDKAYDQQLKAGDNPYLRYNHADAEFQERLQEDTSFGGNLGRAVFQAKKRVLEPLGLVEEGAKTAPGKKRPVEQSPQEPDSSSGIGKTGQQPAKKRLNFGQTGDTESVPDPQPLGEPPAAPSGLGPNTMASGGGAPMADNNEGADGVGNSSGNWHCDSTWLGDRVITTSTRTWALPTYNNHLYKQISNGTSGGSTNDNTYFGYSTPWGYFDFNRFHCHFSPRDWQRLINNNWGFRPKRLNFKLFNIQVKEVTTNEGTKTIANNLTSTVQVFTDSEYQLPYVLGSAHQGCLPPFPADVFMVPQYGYLTLNNGSQALGRSSFYCLEYFPSQMLRTGNNFQFSYTFEDVPFHSSYAHSQSLDRLMNPLIDQYLYYLVRTQTTGTGGTQTLAFSQAGPSSMASQARNWVPGPSYRQQRVSTTTNQNNNSNFAWTGAAKFKLNGRDSLMNPGVAMASHKDDEDRFFPSSGVLIFGKQGAGNDGVDYSQVLITDEEEIKATNPVATEEYGAVAINNQAANTQAQTGLVHNQGVIPGMVWQNRDVYLQGPIWAKIPHTDGNFHPSPLMGGFGLKHPPPQILIKNTPVPADPPLTFNQAKLNSFITQYSTGQVSVEIEWELQKENSKRWNPEIQYTSNYYKSTNVDFAVNTEGVYSEPRPIGTRYLTRNL

SEQ ID NO: 1311 - DNA, 3695 bp, Artificial Sequence
  Synthetic polynucleotide
ctctttgcgcttgcgttttcccttgtccagatagcccagtagctgacattcatccggggtcagcaccgtttctgcggactggctttctacgtgaaaaggatctaggtgaagatcctttttgataatctcatgcctgacatttatattccccagaacatcaggttaatggcgtttttgatgtcattttcgcggtggctgagatcagccacttcttccccgataacggagaccggcacactggccatatcggtggtcatcatgcgccagctttcatccccgatatgcaccaccgggtaaagttcacgggagactttatctgacagcagacgtgcactggccagggggatcaccatccgtcgccccggcgtgtcaataatatcactctgtacatccacaaacagacgataacggctctctcttttataggtgtaaaccttaaactgccgtacgtataggctgcgcaactgttgggaagggcgatcggtgcgggcctcttcgctattacgccagctggcgaaagggggatgtgctgcaaggcgattaagttgggtaacgccagggttttcccagtcacgacgttgtaaaacgacggccagtgaattgtaatacgactcactatagggcgaattgaatttagcggccgcgaattcgcccttatgatatctggtgggaggagggcaagatgacggccaaggtcgtggagtccgccaaggccattctcggcggcagcaaagtgcgcgtggaccaaaagtgcaagtcgtccgcccagatcgatcccactcccgtcattgtcacctccaacaccaacatgtgcgccgtgattgacgggaacagcaccaccttcgagcaccagcagccgttgcaggaccggatgttcaaatttgaacttacccgccgtctggagcatgactttggcaaggtgacaaagcaggaagtcaaagagttcttccgctgggcgcaggatcacgtgaccgaggtggcgcatgagttccacgtcagaaagggtggagccaacaagagacccgcccccgatgacgctgataaaagcgagcccaagcgggcctgcccctcagtcgcagatccatcgacgtcagacgcggaaggagctccggtggactttgccgacaggtaccaaaacaaatgttctcgtcacgcgggcatgcttcagatgctgtttccctgcaagacatgcgagagaatgaatcagaatttcaacatttgcttcacgcacgggaccagggactgttcggagtgcttccccggcgtgtcagaatctcaaccggtcgtcagaaaaaggacgtatcggaaactctgtgccattcatcatctgctggggagggctcccgagattgcttgctcggcctgcgatctggtcaacgtggacctggatgactgtgtctctgagcaataaatgacttaaaccaggtatggctgccgatggttatcttccagattggctcgaggacaacctctctgagggcattcgcgagtggtgggacttgaaacctggagccccgaaacccaaagccaaccagcaaaagcaggacgacggccggggtctggtgcttcctggctacaagtacctcggacccttcaacggactcgacaagggggagcccgtcaacgcggcggacgcagcggccctcgagcacgacaaggcctacgaccagcagctcaaagcgggtgacaatccgtacctgcggtataaccacgccgacgccgagtttcaggagcgtctgcaagaagatacgtcttttgggggcaacctcgggcgagcagtcttccaggccaagaagcgggttctcgaacctctcggtctggttgaggaaggcgctaagacggctcctggaaagaagagaccggtagagcagtcaccccaagaaccagactcctcatcgggcatcggcaagacaggccagcagcccgctaaaaagagactcaattttggtcagactggcgacacagagtcagtccccgacccacaacctctcggagaacctccagcagccccctcaggtctgggacctaatacaatggcttcaggcggtggcgctccaatggcagacaataacgaaggcgccgacggagtgggtaattcctcgggaaattggcattgcgattccacatggctgggggacagagtcatcaccaccagcacccgaacctgggccctgcccacctacaacaaccacctctacaagcaaatctccaacggcacctcgggaggaagcaccaacgacaacacctactttggctacagcaccccctgggggtattttgacttcaacagattccactgccacttttcaccacgtgactggcagcgactcatcaacaacaattggggattccggcccaagagactcaacttcaagctcttcaacatccaggtcaaggaagtcacgacgaacgaaggcaccaagaccatcgccaataatctcaccagcaccgtgcaggtctttacggactcggagtaccagctaccgtacgtgctaggatcagctcaccagggatgtctgcctccgttcccggcggacgtcttcatggttcctcagtacggttatctaactctgaacaatggcagccaggccctgggacgttcctccttctactgcctggagtatttcccatcgcagatgctgagaaccggcaacaactttcagttcagctacaccttcgaggacgtgcctttccacagcagctacgcgcacagccaaagcctggacaggctgatgaatcccctcatcgaccagtacctgtattacctggtcagaacgcagacaaccgggactggagggacgcagactctggcattcagccaagcaggccctagctcaatggccagccaggctagaaactgggtgcccggaccgagctaccggcagcagcgcgtctccacgacaaccaaccagaacaacaacagcaactttgcctggacgggagctgccaaatttaaactgaacggccgagactctctaatgaaccccggcgtggccatggcttcacacaaggatgacgaggaccgcttcttcccttctagcggggtcctgattttcggcaagcaaggagccgggaatgatggagtggattacagccaagtgctgattacagatgaggaagaaatcaaggctaccaaccccgtggcaacagaggaatatggagcagtggccatcaacaaccaggccgctaatacgcaggcgcagaccggactcgtgcacaaccagggggtgattcccggcatggtgtggcagaacagagacgtgtacctgcagggtcccatctgggccaaaattcctcacacggacggcaactttcacccgtctcccctgatgggcggctttggactgaagcacccgcctcctcaaattctcatcaagaacacaccggttccagcggacccgccgcttaccttcaaccaggccaagctgaactctttcatcacgcagtacagcaccggacaggtcagcgtggaaatcgagtgggagctgcagaaagaaaacagcaaacgctggaatccagagattcagtacacttccaactactacaaatctacaaatgtggactttgctgtcaacacggaaggagtgtatagcgagcctcgccccattggcacccgttacctcacccgcaacctgtaattgcctgttaatcaataaaccggttaattcgtttcagtaaggaagaattcgtttaaa

SEQ ID NO: 1312 - protein, 736 aa, Artificial Sequence; identical to SEQ ID NO: 512
  Synthetic polypeptide

SEQ ID NO: 1313 - protein, 736 aa, Artificial Sequence
  Synthetic polypeptide
MAADGYLPDWLEDNLSEGIREWWDLKPGAPKPKANQQKQDDGRGLVLPGYKYLGPFNGLDKGEPVNAADAAALEHDKAYDQQLKAGDNPYLRYNHADAEFQERLQEDTSFGGNLGRAVFQAKKRVLEPLGLVEEGAKTAPGKKRPVEQSPQEPDSSSGIGKTGQQPAKKRLNFGQTGDTESVPDPQPLGEPPAAPSGLGPNTMASGGGAPMADNNEGADGVGNSSGNWHCDSTWLGDRVITTSTRTWALPTYNNHLYKQISNGTSGGSTNDNTYFGYSTPWGYFDFNRFHCHFSPRDWQRLINNNWGFRPKRLNFKLFNIQVKEVTTNEGTKTIANNLTSTVQVFTDSEYQLPYVLGSAHQGCLPPFPADVFMVPQYGYLTLNNGSQALGRSSFYCLEYFPSQMLRTGNNFQFSYTFEDVPFHSSYAHSQSLDRLMNPLIDQYLYYLVRTQTTGTGGTQTLAFSQAGPSNMASQARNWVPGPSYRQQRVSTTTNQNNNSNFAWTGAAKFKLNGRDSLMNPGVAMASHKDDEDRFFPSSGVLIFGKQGAGNDGVDYSQVLITDEEEIKATNPVATEEYGAVAINNQAANTQAQTGLVHNQGVIPGMVWQNRDVYLQGPIWAKIPHTDGNFHPSPLMGGFGLKHPPPQILIKNTPVPADPPLTFNQAKLNSFITQYSTGQVSVEIEWELQKENSKRWNPEIQYTSNYYKSTNVDFAVNTEGVYSEPRPIGTRYLTRNL

SEQ ID NO: 1314 - protein, 738 aa, Artificial Sequence; identical to SEQ ID NO: 1008
  Synthetic polypeptide

SEQ ID NO: 1315 - protein, 736 aa, Artificial Sequence
  Synthetic polypeptide
MAADGYLPDWLEDNLSEGIREWWALQPGAPKPKANQQHQDNARGLVLPGYKYLGPGNGLDKGEPVNAADAAALEHDKAYDQQLKAGDNPYLKYNHADAEFQERLKEDTSFGGNLGRAVFQAKKRILEPLGLVEEAAKTAPGKKRPVDQSPQEPDSSSGVGKSGKQPARKRLNFGQTGDSESVPDPQPLGEPPAAPTSLGSNTMASGGGAPMADNNEGADGVGNSSGNWHCDSQWLGDRVITTSTRTWALPTYNNHLYKQISSQSGASNDNHYFGYSTPWGYFDFNRFHCHFSPRDWQRLINNNWGFRPKKLSFKLFNIQVKEVTQNDGTTTIANNLTSTVQVFTDSEYQLPYVLGSAHQGCLPPFPADVFMVPQYGYLTLNNGSQAVGRSSFYCLEYFPSQMLRTGNNFQFSYTFEDVPFHSSYAHSQSLDRLMNPLIDQYLYYLNRTQGTTSGTTNQSRLLFSQAGPQSMSLQARNWLPGPCYRQQRLSKTANDNNNSNFPWTAASKYHLNGRDSLVNPGPAMASHKDDEEKFFPMHGNLIFGKEGTTASNAELDNVMITDEEEIRTTNPVATEQYGTVANNLQSSNTAPTTRTVNDQGALPGMVWQDRDVYLQGPIWAKIPHTDGHFHPSPLMGGFGLKHPPPQIMIKNTPVPANPPTTFSPAKFASFITQYSTGQVSVEIEWELQKENSKRWNPEIQYTSNYNKSVNVDFTVDTNGVYSEPRPIGTRYLTRPL

SEQ ID NO: 1316 - protein, 736 aa, Artificial Sequence
  Synthetic polypeptide
MAADGYLPDWLEDNLSEGIREWWALQPGAPKPKANQQHQDNARGLVLPGYKYLGPGNGLDKGEPVNAADAAALEHDKAYDQQLKAGDNPYLKYNHADAEFQERLKEDTSFGGNLGRAVFQAKKRLLEPLGLVEEAAKTAPGKKRPVDQSPQEPDSSSGVGKSGKQPARKRLNFGQTGDSESVPDPQPLGEPPAAPTSLGSNTMASGGGAPMADNNEGADGVGNSSGNWHCDSQWLGDRVITTSTRTWALPTYNNHLYKQISSQSGASNDNHYFGYSTPWGYFDFNRFHCHFSPRDWQRLINNNWGFRPKKLSFKLFNIQVKEVTQNDGTTTIANNLTSTVQVFTDSEYQLPYVLGSAHQGCLPPFPADVFMVPQYGYLTLNNGSQAVGRSSFYCLEYFPSQMLRTGNNFQFSYTFEDVPFHSSYAHSQSLDRLMNPLIDQYLYYLNRTQGTTSGTTNQSRLLFSQAGPQSMSLQARNWLPGPCYRQQRLSKVANDNNNSNFPWTAASKYHLNGRDSLVNPGPAMASHKDDEEKFFPMHGNLIFGKEGTTASNAELDNVMITDEEEIRTTNPVATEQYGTVANNLQSSNTAPTTRTVNDQGALPGMVWQDRDVYLQGPIWAKIPHTDGHFHPSPLMGGFGLKHPPPQIMIKNTPVPANPPTTFVPAKFASFITQYSTGQVSVEIEWELQKENSKRWNPEIQYTSNYNKSVNVDFTVDTNGVYSEPRPIGTRYLTRPL

SEQ ID NO: 1317 - protein, 736 aa, Artificial Sequence
  Synthetic polypeptide
  MOD_RES (168)..(168): Any naturally occurring amino acid
  MOD_RES (204)..(204): Any naturally occurring amino acid
  MOD_RES (266)..(266): Any naturally occurring amino acid
  MOD_RES (311)..(311): Any naturally occurring amino acid
  MOD_RES (411)..(411): Any naturally occurring amino acid
  MOD_RES (460)..(460): Any naturally occurring amino acid
  MOD_RES (493)..(493): Any naturally occurring amino acid
  MOD_RES (562)..(562): Any naturally occurring amino acid
  MOD_RES (576)..(576): Any naturally occurring amino acid
  MOD_RES (587)..(587): Any naturally occurring amino acid
  MOD_RES (609)..(609): Any naturally occurring amino acid
MAADGYLPDWLEDNLSEGIREWWDLKPGAPKPKANQQKQDDGRGLVLPGYKYLGPFNGLDKGEPVNAADAAALEHDKAYDQQLKAGDNPYLRYNHADAEFQERLQEDTSFGGNLGRAVFQAKKRVLEPLGLVEEGAKTAPGKKRPVEQSPQEPDSSSGIGKKGQQPAXKRLNFGQTGDSESVPDPQPLGEPPAAPSGVGSNTMXAGGGAPMADNNEGADGVGNASGNWHCDSTWLGDRVITTSTRTWALPTYNNHLYKQISSQSGXSTNDNTYFGYSTPWGYFDFNRFHCHFSPRDWQRLINNNWGFRPKXLNFKLFNIQVKEVTTNDGTTTIANNLTSTVQVFTDSEYQLPYVLGSAHQGCLPPFPADVFMIPQYGYLTLNNGSQAVGRSSFYCLEYFPSQMLRTGNNFXFSYTFEDVPFHSSYAHSQSLDRLMNPLIDQYLYYLSRTQTTSGTAGNRXLQFSQAGPSSMANQAKNWLPGPCYRQQRVSKTXNQNNNSNFAWTGATKYHLNGRDSLVNPGPAMATHKDDEDKFFPMSGVLIFGKQGAGNSNVDLDNVMITXEEEIKTTNPVATEXYGTVATNLQSXNTAPATGTVNSQGALPGMVWQXRDVYLQGPIWAKIPHTDGHFHPSPLMGGFGLKHPPPQILIKNTPVPANPPTTFSPAKFASFITQYSTGQVSVEIEWELQKENSKRWNPEIQYTSNYNKSTNVDFAVDTNGVYSEPRPIGTRYLTRNL

SEQ ID NO: 1318 - DNA, 2208 bp, Artificial Sequence
  Synthetic polynucleotide
  modified_base (502)..(504): a, c, t, or g
  misc_feature (502)..(504): n is a, c, g, or t
  modified_base (610)..(612): a, c, t, or g
  misc_feature (610)..(612): n is a, c, g, or t
  modified_base (796)..(798): a, c, t, or g
  misc_feature (796)..(798): n is a, c, g, or t
  modified_base (931)..(933): a, c, t, or g
  misc_feature (931)..(933): n is a, c, g, or t
  modified_base (1231)..(1233): a, c, t, or g
  misc_feature (1231)..(1233): n is a, c, g, or t
  modified_base (1378)..(1380): a, c, t, or g
  misc_feature (1378)..(1380): n is a, c, g, or t
  modified_base (1477)..(1479): a, c, t, or g
  misc_feature (1477)..(1479): n is a, c, g, or t
  modified_base (1684)..(1686): a, c, t, or g
  misc_feature (1684)..(1686): n is a, c, g, or t
  modified_base (1726)..(1728): a, c, t, or g
  misc_feature (1726)..(1728): n is a, c, g, or t
  modified_base (1759)..(1761): a, c, t, or g
  misc_feature (1759)..(1761): n is a, c, g, or t
  modified_base (1825)..(1827): a, c, t, or g
  misc_feature (1825)..(1827): n is a, c, g, or t
atggctgccgatggttatcttccagattggctcgaggacaacctctctgagggcattcgcgagtggtgggacttgaaacctggagccccgaaacccaaagccaaccagcaaaagcaggacgacggccggggtctggtgcttcctggctacaagtacctcggacccttcaacggactcgacaagggggagcccgtcaacgcggcggacgcagcggccctcgagcacgacaaggcctacgaccagcagctcaaagcgggtgacaatccgtacctgcggtataaccacgccgacgccgagtttcaggagcgtctgcaagaagatacgtcttttgggggcaacctcgggcgagcagtcttccaggccaagaagcgggttctcgaacctctcggtctggttgaggaaggcgctaagacggctcctggaaagaagagaccggtagagcaatcaccccaggaaccagactcctcttcgggcatcggcaagaaaggccagcagcccgcgnnnaagagactcaactttgggcagacaggcgactcagagtcagtgcccgaccctcaaccactcggagaaccccccgcagccccctctggtgtgggatctaatacaatgnnngcaggcggtggcgctccaatggcagacaataacgaaggcgccgacggagtgggtaacgcctcaggaaattggcattgcgattccacatggctgggcgacagagtcatcaccaccagcacccgaacctgggccctccccacctacaacaaccacctctacaagcaaatctccagccaatcgggannnagcaccaacgacaacacctacttcggctacagcaccccctgggggtattttgactttaacagattccactgccacttctcaccacgtgactggcagcgactcatcaacaacaactggggattccggcccaagnnnctcaacttcaagctcttcaacatccaggtcaaggaggtcacgacgaatgatggcaccacgaccatcgccaataaccttaccagcacggttcaggtctttacggactcggaataccagctcccgtacgtcctcggctctgcgcaccagggctgcctgcctccgttcccggcggacgtcttcatgattcctcagtacgggtacctgactctgaacaatggcagtcaggccgtgggccgttcctccttctactgcctggagtactttccttctcaaatgctgagaacgggcaacaactttnnnttcagctacacgtttgaggacgtgccttttcacagcagctacgcgcacagccaaagcctggaccggctgatgaaccccctcatcgaccagtacctgtactacctgtctcggactcagaccacgagtggtaccgcaggaaatcggnnnttgcaattttctcaggccgggcctagtagcatggcgaatcaggccaaaaactggctacccgggccctgctaccggcagcaacgcgtctccaagacannnaatcaaaataacaacagcaactttgcctggaccggtgccaccaagtatcatctgaatggcagagactctctggtaaatcccggtcccgctatggcaacccacaaggacgacgaagacaaattttttccgatgagcggagtcttaatatttgggaaacagggagctggaaatagcaacgtggaccttgacaacgttatgataaccnnngaggaagaaattaaaaccaccaacccagtggccacagaannntacggcacggtggccactaacctgcaatcgnnnaacaccgctcctgctacagggaccgtcaacagtcaaggagccttacctggcatggtctggcagnnncgggacgtgtacctgcagggtcctatctgggccaagattcctcacacggacggacactttcatccctcgccgctgatgggaggctttggactgaaacacccgcctcctcagatcctgattaagaatacacctgttcccgcgaatcctccaactaccttcagtccagctaagtttgcgtcgttcatcacgcagtacagcaccggacaggtcagcgtggaaattgaatgggagctgcagaaagaaaacagcaaacgctggaacccagagattcaatacacttccaactacaacaaatctacaaatgtggactttgctgttgacacaaatggcgtttattctgagcctcgccccatcggcacccgttacctcacccgtaatctg

SEQ ID NO: 1319 - protein, 737 aa, Artificial Sequence
  Synthetic polypeptide
  MOD_RES (157)..(157): Any naturally occurring amino acid
  MOD_RES (168)..(168): Any naturally occurring amino acid
  MOD_RES (262)..(263): Any naturally occurring amino acid
  MOD_RES (312)..(312): Any naturally occurring amino acid
  MOD_RES (412)..(412): Any naturally occurring amino acid
  MOD_RES (460)..(461): Any naturally occurring amino acid
  MOD_RES (552)..(552): Any naturally occurring amino acid
  MOD_RES (556)..(557): Any naturally occurring amino acid
  MOD_RES (563)..(563): Any naturally occurring amino acid
  MOD_RES (580)..(580): Any naturally occurring amino acid
  MOD_RES (588)..(588): Any naturally occurring amino acid
  MOD_RES (664)..(664): Any naturally occurring amino acid
MAADGYLPDWLEDNLSEGIREWWDLKPGAPKPKANQQKQDDGRGLVLPGYKYLGPFNGLDKGEPVNAADAAALEHDKAYDQQLKAGDNPYLRYNHADAEFQERLQEDTSFGGNLGRAVFQAKKRVLEPLGLVEEGAKTAPGKKRPVEQSPQEPDSSXGIGKKGQQPAXKRLNFGQTGDSESVPDPQPLGEPPAAPSGVGSNTMAAGGGAPMADNNEGADGVGNASGNWHCDSTWLGDRVITTSTRTWALPTYNNHLYKQISXXQSGGSTNDNTYFGYSTPWGYFDFNRFHCHFSPRDWQRLINNNWGFRPKXLNFKLFNIQVKEVTTNDGTTTIANNLTSTVQVFTDSEYQLPYVLGSAHQGCLPPFPADVFMIPQYGYLTLNNGSQAVGRSSFYCLEYFPSQMLRTGNNFXFSYTFEDVPFHSSYAHSQSLDRLMNPLIDQYLYYLSRTQTTGGTAGNXXLQFSQAGPSSMANQAKNWLPGPCYRQQRVSKTTNQNNNSNFAWTGATKYHLNGRDSLVNPGVAMATHKDDEDRFFPSSGVLIFGKQGAGNXNVDXXNVMITXEEEIKTTNPVATEEYGXVATNLQSXNTAPQTGTVNSQGALPGMVWQNRDVYLQGPIWAKIPHTDGNFHPSPLMGGFGLKHPPPQILIKNTPVPANPPTTFXPAKFASFITQYSTGQVSVEIEWELQKENSKRWNPEIQYTSNYNKSTNVDFAVDTEGVYSEPRPIGTRYLTRNL

SEQ ID NO: 1320 - DNA, 2211 bp, Artificial Sequence
  Synthetic polynucleotide
  modified_base (469)..(471): a, c, t, or g
  misc_feature (469)..(471): n is a, c, g, or t
  modified_base (502)..(504): a, c, t, or g
  misc_feature (502)..(504): n is a, c, g, or t
  modified_base (784)..(789): a, c, t, or g
  misc_feature (784)..(789): n is a, c, g, or t
  modified_base (934)..(936): a, c, t, or g
  misc_feature (934)..(936): n is a, c, g, or t
  modified_base (1234)..(1236): a, c, t, or g
  misc_feature (1234)..(1236): n is a, c, g, or t
  modified_base (1378)..(1383): a, c, t, or g
  misc_feature (1378)..(1383): n is a, c, g, or t
  modified_base (1654)..(1656): a, c, t, or g
  misc_feature (1654)..(1656): n is a, c, g, or t
  modified_base (1666)..(1671): a, c, t, or g
  misc_feature (1666)..(1671): n is a, c, g, or t
  modified_base (1687)..(1689): a, c, t, or g
  misc_feature (1687)..(1689): n is a, c, g, or t
  modified_base (1738)..(1740): a, c, t, or g
  misc_feature (1738)..(1740): n is a, c, g, or t
  modified_base (1762)..(1764): a, c, t, or g
  misc_feature (1762)..(1764): n is a, c, g, or t
  modified_base (1990)..(1992): a, c, t, or g
  misc_feature (1990)..(1992): n is a, c, g, or t
atggctgccgatggttatcttccagattggctcgaggacaacctctctgagggcattcgcgagtggtgggacttgaaacctggagccccgaaacccaaagccaaccagcaaaagcaggacgacggccggggtctggtgcttcctggctacaagtacctcggacccttcaacggactcgacaagggggagcccgtcaacgcggcggacgcagcggccctcgagcacgacaaggcctacgaccagcagctcaaagcgggtgacaatccgtacctgcggtataaccacgccgacgccgagtttcaggagcgtctgcaagaagatacgtcttttgggggcaacctcgggcgagcagtcttccaggccaagaagcgggttctcgaacctctcggtctggttgaggaaggcgctaagacggctcctggaaagaagagaccggtagagcaatcaccccaggaaccagactcctctnnnggcatcggcaagaaaggccagcagcccgcgnnnaagagactcaactttgggcagactggcgactcagagtcagtgcccgaccctcaaccactcggagaaccccccgcagccccctctggtgtgggatctaatacaatggctgcaggcggtggcgctccaatggcagacaataacgaaggcgccgacggagtgggtaatgcctcaggaaattggcattgcgattccacatggctgggcgacagagtcatcaccaccagcacccgaacctgggccctccccacctacaacaaccacctctacaagcaaatctccnnnnnncaatcgggaggaagcaccaacgacaacacctacttcggctacagcaccccctgggggtattttgactttaacagattccactgccacttctcaccacgtgactggcagcgactcatcaacaacaactggggattccggcccaagnnnctcaacttcaagctcttcaacatccaggtcaaggaggtcacgacgaatgatggcaccacgaccatcgccaataaccttaccagcacggttcaggtctttacggactcggaataccagctcccgtacgtcctcggctctgcgcaccagggctgcctgcctccgttcccggcggacgtcttcatgattcctcagtacgggtacctgactctgaacaatggcagtcaggccgtgggccgttcctccttctactgcctggagtactttccttctcaaatgctgagaacgggcaacaactttnnnttcagctacacgtttgaggacgtgccttttcacagcagctacgcgcacagccaaagcctggaccggctgatgaaccccctcatcgaccagtacctgtactacctgtctcggactcagaccacgggaggtaccgcaggaaatnnnnnnttgcaattttctcaggccgggcctagtagcatggcgaatcaggccaaaaactggctacccgggccctgctaccggcagcaacgcgtctccaagacaacgaatcaaaataacaacagcaactttgcctggaccggtgccaccaagtatcatctgaatggcagagactctctggtaaatcccggtgtcgctatggcaacccacaaggacgacgaagaccgattttttccgtccagcggagtcttaatatttgggaaacagggagctggaaatnnnaacgtggacnnnnnnaacgttatgataaccnnngaggaagaaattaaaaccaccaacccagtggccacagaagagtacggcnnngtggccactaacctgcaatcgnnnaacaccgctcctcaaacagggaccgtcaacagtcaaggagccttacctggcatggtctggcagaaccgggacgtgtacctgcagggtcctatctgggccaagattcctcacacggacggaaactttcatccctcgccgctgatgggaggctttggactgaaacacccgcctcctcagatcctgattaagaatacacctgttcccgcgaatcctccaactaccttcnnnccagctaagtttgcgtcgttcatcacgcagtacagcaccggacaggtcagcgtggaaattgaatgggagctgcagaaagaaaacagcaaacgctggaacccagagattcaatacacttccaactacaacaaatctacaaatgtggactttgctgttgacacagaaggcgtttattctgagcctcgccccatcggcacccgttacctcacccgtaatctg

SEQ ID NO: 1321 - protein, 738 aa, Artificial Sequence
  Synthetic polypeptide
  MOD_RES (158)..(158): Any naturally occurring amino acid
  MOD_RES (169)..(169): Any naturally occurring amino acid
  MOD_RES (564)..(564): Any naturally occurring amino acid
MAADGYLPDWLEDNLSEGIREWWDLKPGAPKPKANQQKQDDGRGLVLPGYKYLGPFNGLDKGEPVNAADAAALEHDKAYDQQLKAGDNPYLRYNHADAEFQERLQEDTSFGGNLGRAVFQAKKRVLEPLGLVEEGAKTAPGKKRPVEQSPQREPDSSXGIGKKGQQPAXKRLNFGQTGDSESVPDPQPLGEPPAAPSGVGSNTMAAGGGAPMADNNEGADGVGNSSGNWHCDSTWLGDRVITTSTRTWALPTYNNHLYKQISNGTSGGSTNDNTYFGYSTPWGYFDFNRFHCHFSPRDWQRLINNNWGFRPKRLNFKLFNIQVKEVTTNEGTKTIANNLTSTVQVFTDSEYQLPYVLGSAHQGCLPPFPADVFMIPQYGYLTLNNGSQAVGRSSFYCLEYFPSQMLRTGNNFQFSYTFEDVPFHSSYAHSQSLDRLMNPLIDQYLYYLSRTQTTGGTAGTQTLQFSQAGPSSMANQAKNWLPGPCYRQQRVSTTTNQNNNSNFAWTGATKYHLNGRDSLVNPGVAMATHKDDEDRFFPSSGVLIFGKQGAGNDNVDYSNVMITXEEEIKTTNPVATEEYGVVATNLQSANTAPQTGTVNSQGALPGMVWQNRDVYLQGPIWAKIPHTDGNFHPSPLMGGFGLKHPPPQILIKNTPVPADPPTTFNQAKLNSFITQYSTGQVSVEIEWELQKENSKRWNPEIQYTSNYYKSTNVDFAVNTEGVYSEPRPIGTRYLTRNL

SEQ ID NO: 1322 - DNA, 2214 bp, Artificial Sequence
  Synthetic polynucleotide
  modified_base (472)..(474): a, c, t, or g
  misc_feature (472)..(474): n is a, c, g, or t
  modified_base (505)..(507): a, c, t, or g
  misc_feature (505)..(507): n is a, c, g, or t
  modified_base (1690)..(1692): a, c, t, or g
  misc_feature (1690)..(1692): n is a, c, g, or t
atggctgccgatggttatcttccagattggctcgaggacaacctctctgagggcattcgcgagtggtgggacctgaaacctggagccccgaaacccaaagccaaccagcaaaagcaggacgacggccggggtctggtgcttcctggctacaagtacctcggacccttcaacggactcgacaagggggagcccgtcaacgcggcggacgcagcggccctcgagcacgacaaggcctacgaccagcagctcaaagcgggtgacaatccgtacctgcggtataatcacgccgacgccgagtttcaggagcgtctgcaagaagatacgtcttttgggggcaacctcgggcgagcagtcttccaggccaagaagcgggttctcgaacctctcggtctggttgaggaaggcgctaagacggctcctggaaagaagagaccggtagagcagtcaccacagcgtgagcccgactcctccnnnggcatcggcaagaaaggccagcagcccgccnnnaagagactcaatttcggtcagactggcgactcagagtcagtccccgaccctcaacctctcggagaacctccagcagcgccctctggtgtgggatctaatacaatggctgcaggcggtggcgcaccaatggcagacaataacgaaggtgccgacggagtgggtaattcctcgggaaattggcattgcgattccacatggctgggcgacagagtcatcaccaccagcacccgaacctgggccctgcccacctacaacaaccacctctacaagcaaatctccaacgggacctcgggaggcagcaccaacgacaacacctactttggctacagcaccccctgggggtattttgactttaacagattccactgccacttctcaccacgtgactggcagcgactcatcaacaacaactggggattccggcccaagagactcaacttcaagctcttcaacatccaggtcaaagaggtcacgacgaatgaaggcaccaagaccatcgccaataacctcaccagcaccgtccaggtgtttacggactcggaataccagctgccgtacgtcctcggctctgcccaccagggctgcctgcctccgttcccggcggacgtcttcatgattcctcagtacggctacctgactctcaacaacggtagtcaggccgtgggacgttcctccttctactgcctggagtacttcccctctcagatgctgagaacgggcaacaactttcaattcagctacactttcgaggacgtgcctttccacagcagctacgcgcacagccagagtttggacaggctgatgaatcctctcatcgaccagtacctgtactacctgtcaagaacccagactacgggaggcacagcgggaacccagacgttgcagttttctcaggccgggcctagcagcatggcgaatcaggccaaaaactggctgcctggaccctgctacagacagcagcgcgtctccacgacaacgaatcaaaacaacaacagcaactttgcctggactggtgccaccaagtatcatctgaacggcagagactctctggtgaatccgggcgtcgccatggcaacccacaaggacgacgaggaccgcttcttcccatccagcggcgtcctcatatttggcaagcagggagctggaaatgacaacgtggactatagcaacgtgatgataaccnnngaggaagaaatcaagaccaccaaccccgtggccacagaagagtatggcgtggtggctactaacctacagtcggcaaacaccgctcctcaaacggggaccgtcaacagccagggagccttacctggcatggtctggcagaaccgggacgtgtacctgcagggtcctatttgggccaagattcctcacacagatggcaactttcacccgtctcctttaatgggcggctttggacttaaacatccgcctcctcagatcctcatcaaaaacactcctgttcctgcggatcctccaacaacgttcaaccaggccaagctgaattctttcatcacgcagtacagcaccggacaagtcagcgtggagatcgagtgggagctgcagaaggagaacagcaagcgctggaacccagagattcagtatacttccaactactacaaatctacaaatgtggactttgctgttaatactgagggtgtttactctgagcctcgccccattggcactcgttacctcacccgtaatctg

SEQ ID NO: 1323 - protein, 738 aa, Artificial Sequence
  Synthetic polypeptide
  MOD_RES (158)..(158): Any naturally occurring amino acid
  MOD_RES (169)..(169): Any naturally occurring amino acid
  MOD_RES (315)..(315): Any naturally occurring amino acid
  MOD_RES (413)..(413): Any naturally occurring amino acid
  MOD_RES (472)..(472): Any naturally occurring amino acid
  MOD_RES (534)..(534): Any naturally occurring amino acid
  MOD_RES (542)..(542): Any naturally occurring amino acid
  MOD_RES (595)..(595): Any naturally occurring amino acid
MAADGYLPDWLEDNLSEGIREWWDLKPGAPKPKANQQKQDDGRGLVLPGYKYLGPFNGLDKGEPVNAADAAALEHDKAYDQQLKAGDNPYLRYNHADAEFQERLQEDTSFGGNLGRAVFQAKKRVLEPLGLVEEGAKTAPGKKRPVEQSPQREPDSSXGIGKKGQQPAXKRLNFGQTGDSESVPDPQPLGEPPAAPSGVGSNTMAAGGGAPMADNNEGADGVGSSSGNWHCDSTWLGDRVITTSTRTWALPTYNNHLYKQISNGTSGGSTNDNTYFGYSTPWGYFDFNRFHCHFSPRDWQRLINNNWGFRPKRLXFKLFNIQVKEVTQNEGTKTIANNLTSTIQVFTDSEYQLPYVLGSAHQGCLPPFPADVFMIPQYGYLTLNNGSQAVGRSSFYCLEYFPSQMLRTGNNFXFSYTFEDVPFHSSYAHSQSLDRLMNPLIDQYLYYLSRTQTTGGTAGTQTLQFSQAGPSXMANQAKNWLPGPCYRQQRVSTTTSQNNNSNFAWTGATKYHLNGRDSLVNPGVAMATHKDDEXRFFPSSGXLIFGKQGAGKDNVDYSNVMLTSEEEIKTTNPVATEEYGVVADNLQQQNTAPQXGTVNSQGALPGMVWQNRDVYLQGPIWAKIPHTDGNFHPSPLMGGFGLKHPPPQILIKNTPVPADPPTTFNQAKLNSFITQYSTGQVSVEIEWELQKENSKRWNPEIQYTSNYYKSTNVDFAVNTEGVYSEPRPIGTRYLTRNL

SEQ ID NO: 1324 - DNA, 2214 bp, Artificial Sequence
  Synthetic polynucleotide
  modified_base (472)..(474): a, c, t, or g
  misc_feature (472)..(474): n is a, c, g, or t
  modified_base (505)..(507): a, c, t, or g
  misc_feature (505)..(507): n is a, c, g, or t
  modified_base (943)..(945): a, c, t, or g
  misc_feature (943)..(945): n is a, c, g, or t
  modified_base (1237)..(1239): a, c, t, or g
  misc_feature (1237)..(1239): n is a, c, g, or t
  modified_base (1414)..(1416): a, c, t, or g
  misc_feature (1414)..(1416): n is a, c, g, or t
  modified_base (1600)..(1602): a, c, t, or g
  misc_feature (1600)..(1602): n is a, c, g, or t
  modified_base (1624)..(1626): a, c, t, or g
  misc_feature (1624)..(1626): n is a, c, g, or t
  modified_base (1783)..(1785): a, c, t, or g
  misc_feature (1783)..(1785): n is a, c, g, or t
atggctgccgatggttatcttccagattggctcgaggacaacctctctgagggcattcgcgagtggtgggacctgaaacctggagccccgaaacccaaagccaaccagcaaaagcaggacgacggccggggtctggtgcttcctggctacaagtacctcggacccttcaacggactcgacaagggggagcccgtcaacgcggcggacgcagcggccctcgagcacgacaaggcctacgaccagcagctcaaagcgggtgacaatccgtacctgcggtataatcacgccgacgccgagtttcaggagcgtctgcaagaagatacgtcttttgggggcaacctcgggcgagcagtcttccaggccaagaagcgggttctcgaacctctcggtctggttgaggaaggcgctaagacggctcctggaaagaagagaccggtagagcagtcaccacagcgtgagcccgactcctccnnnggcatcggcaagaaaggccagcagcccgccnnnaagagactcaatttcggtcagactggcgactcagagtcagtccccgaccctcaacctctcggagaacctccagcagcgccctctggtgtgggatctaatacaatggctgcaggcggtggcgcaccaatggcagacaataacgaaggtgccgacggagtgggtagttcctcgggaaattggcattgcgattccacatggctgggcgacagagtcatcaccaccagcacccgaacctgggccctgcccacctacaacaaccacctctacaagcaaatctccaacgggacctcgggaggcagcaccaacgacaacacctactttggctacagcaccccctgggggtattttgactttaacagattccactgccacttctcaccacgtgactggcagcgactcatcaacaacaactggggattccggcccaagagactcnnnttcaagctcttcaacatccaggtcaaagaggtcacgcagaatgaaggcaccaagaccatcgccaataacctcaccagcaccatccaggtgtttacggactcggaataccagctgccgtacgtcctcggctctgcccaccagggctgcctgcctccgttcccggcggacgtcttcatgattcctcagtacggctacctgactctcaacaacggtagtcaggccgtgggacgttcctccttctactgcctggagtacttcccctctcagatgctgagaacgggcaacaactttnnnttcagctacactttcgaggacgtgcctttccacagcagctacgcgcacagccagagtttggacaggctgatgaatcctctcatcgaccagtacctgtactacctgtcaagaacccagactacgggaggcacagcgggaacccagacgttgcagttttctcaggccgggcctagcnnnatggcgaatcaggccaaaaactggctgcctggaccctgctacagacagcagcgcgtctccacgacaacgtcgcaaaacaacaacagcaactttgcctggactggtgccaccaagtatcatctgaacggcagagactctctggtgaatccgggcgtcgccatggcaacccacaaggacgacgagnnncgcttcttcccatccagcggcnnnctcatatttggcaagcagggagctggaaaagacaacgtggactatagcaacgtgatgctaaccagcgaggaagaaatcaagaccaccaaccccgtggccacagaagagtatggcgtggtggctgataacctacagcagcaaaacaccgctcctcaannngggaccgtcaacagccagggagccttacctggcatggtctggcagaaccgggacgtgtacctgcagggtcctatttgggccaagattcctcacacagatggcaactttcacccgtctcctttaatgggcggctttggacttaaacatccgcctcctcagatcctcatcaaaaacactcctgttcctgcggatcctccaacaacgttcaaccaggccaagctgaattctttcatcacgcagtacagcaccggacaagtcagcgtggagatcgagtgggagctgcagaaggagaacagcaagcgctggaacccagagattcagtatacttccaactactacaaatctacaaatgtggactttgctgttaatactgagggtgtttactctgagcctcgccccattggcactcgttacctcacccgtaatctg

SEQ ID NO: 1325 - protein, 738 aa, Artificial Sequence
  Synthetic polypeptide
  MOD_RES (169)..(169): Any naturally occurring amino acid
  MOD_RES (315)..(315): Any naturally occurring amino acid
  MOD_RES (534)..(534): Any naturally occurring amino acid
  MOD_RES (542)..(542): Any naturally occurring amino acid
MAADGYLPDWLEDNLSEGIREWWDLKPGAPKPKANQQKQDDGRGLVLPGYKYLGPFNGLDKGEPVNAADAAALEHDKAYDQQLKAGDNPYLRYNHADAEFQERLQEDTSFGGNLGRAVFQAKKRVLEPLGLVEEGAKTAPGKKRPVEPSPQRSPDSSTGIGKKGQQPAXKRLNFGQTGDSESVPDPQPIGEPPAAPSGVGSGTMAAGGGAPMADNNEGADGVGSSSGNWHCDSTWLGDRVITTSTRTWALPTYNNHLYKQISNGTSGGSTNDNTYFGYSTPWGYFDFNRFHCHFSPRDWQRLINNNWGFRPKRLXFKLFNIQVKEVTQNEGTKTIANNLTSTIQVFTDSEYQLPYVLGSAHQGCLPPFPADVFMIPQYGYLTLNNGSQAVGRSSFYCLEYFPSQMLRTGNNFEFSYTFEDVPFHSSYAHSQSLDRLMNPLIDQYLYYLSRTQSTGGTAGTQQLLFSQAGPSNMSAQAKNWLPGPCYRQQRVSTTLSQNNNSNFAWTGATKYHLNGRDSLVNPGVAMATHKDDEXRFFPSSGXLMFGKQGAGKDNVDYSNVMLTSEEEIKTTNPVATEQYGVVADNLQQQNTAPIVGAVNSQGALPGMVWQNRDVYLQGPIWAKIPHTDGNFHPSPLMGGFGLKHPPPQILIKNTPVPADPPTTFNQAKLNSFITQYSTGQVSVEIEWELQKENSKRWNPEIQYTSNYYKSTNVDFAVNTEGVYSEPRPIGTRYLTRNL

SEQ ID NO: 1326 - DNA, 2214 bp, Artificial Sequence
  Synthetic polynucleotide
  modified_base (505)..(507): a, c, t, or g
  misc_feature (505)..(507): n is a, c, g, or t
  modified_base (943)..(945): a, c, t, or g
  misc_feature (943)..(945): n is a, c, g, or t
  modified_base (1600)..(1602): a, c, t, or g
  misc_feature (1600)..(1602): n is a, c, g, or t
  modified_base (1624)..(1626): a, c, t, or g
  misc_feature (1624)..(1626): n is a, c, g, or t
atggctgccgatggttatcttccagattggctcgaggacaacctctctgagggcattcgcgagtggtgggacctgaaacctggagccccgaaacccaaagccaaccagcaaaagcaggacgacggccggggtctggtgcttcctggctacaagtacctcggacccttcaacggactcgacaagggggagcccgtcaacgcggcggacgcagcggccctcgagcacgacaaggcctacgaccagcagctcaaagcgggtgacaatccgtacctgcggtataatcacgccgacgccgagtttcaggagcgtctgcaagaagatacgtcttttgggggcaacctcgggcgagcagtcttccaggccaagaagcgggttctcgaacctctcggtctggttgaggaaggcgctaagacggctcctggaaagaagagaccggtagagccgtcaccacagcgttcccccgactcctccacgggcatcggcaagaaaggccagcagcccgccnnnaagagactcaatttcggtcagactggcgactcagagtcagtccccgaccctcaacctatcggagaacctccagcagcgccctctggtgtgggatctggtacaatggctgcaggcggtggcgcaccaatggcagacaataacgaaggtgccgacggagtgggtagttcctcgggaaattggcattgcgattccacatggctgggcgacagagtcatcaccaccagcacccgaacctgggccctgcccacctacaacaaccacctctacaagcaaatctccaacgggacctcgggaggcagcaccaacgacaacacctactttggctacagcaccccctgggggtattttgactttaacagattccactgccacttctcaccacgtgactggcagcgactcatcaacaacaactggggattccggcccaagagactcnnnttcaagctcttcaacatccaggtcaaagaggtcacgcagaatgaaggcaccaagaccatcgccaataacctcaccagcaccatccaggtgtttacggactcggaataccagctgccgtacgtcctcggctctgcccaccagggctgcctgcctccgttcccggcggacgtcttcatgattcctcagtacggctacctgactctcaacaacggtagtcaggccgtgggacgttcctccttctactgcctggagtacttcccctctcagatgctgagaacgggcaacaactttgagttcagctacactttcgaggacgtgcctttccacagcagctacgcgcacagccagagtttggacaggctgatgaatcctctcatcgaccagtacctgtactacctgtcaagaacccagtctacgggaggcacagcgggaacccagcagttgctgttttctcaggccgggcctagcaacatgtcggctcaggccaaaaactggctgcctggaccctgctacagacagcagcgcgtctccacgacactgtcgcaaaacaacaacagcaactttgcctggactggtgccaccaagtatcatctgaacggcagagactctctggtgaatccgggcgtcgccatggcaacccacaaggacgacgagnnncgcttcttcccatccagcggcnnnctcatgtttggcaagcagggagctggaaaagacaacgtggactatagcaacgtgatgctaaccagcgaggaagaaatcaagaccaccaaccccgtggccacagaacagtatggcgtggtggctgataacctacagcagcaaaacaccgctcctattgtgggggccgtcaacagccagggagccttacctggcatggtctggcagaaccgggacgtgtacctgcagggtcctatttgggccaagattcctcacacagatggcaactttcacccgtctcctttaatgggcggctttggacttaaacatccgcctcctcagatcctcatcaaaaacactcctgttcctgcggatcctccaacaacgttcaaccaggccaagctgaattctttcatcacgcagtacagcaccggacaagtcagcgtggagatcgagtgggagctgcagaaggagaacagcaagcgctggaacccagagattcagtatacttccaactactacaaatctacaaatgtggactttgctgttaatactgagggtgtttactctgagcctcgccccattggcactcgttacctcacccgtaatctg

SEQ ID NO: 1327 - protein, 738 aa, Artificial Sequence
  Synthetic polypeptide
  MOD_RES (471)..(471): Any naturally occurring amino acid
MAADGYLPDWLEDNLSEGIREWWDLKPGAPKPKANQQKQDDGRGLVLPGYKYLGPFNGLDKGEPVNAADAAALEHDKAYDQQLKAGDNPYLRYNHADAEFQERLQEDTSFGGNLGRAVFQAKKRVLEPLGLVEEGAKTAPGKKRPVEPSPQRSPDSSTGIGKKGQQPAKKRLNFGQTGDSESVPDPQPIGEPPAGPSGLGSGTMAAGGGAPMADNNEGADGVGSSSGNWHCDSTWLGDRVITTSTRTWALPTYNNHLYKQISNGTSGGSTNDNTYFGYSTPWGYFDFNRFHCHFSPRDWQRLINNNWGFRPKRLNFKLFNIQVKEVTQNEGTKTIANNLTSTIQVFTDSEYQLPYVLGSAHQGCLPPFPADVFMIPQYGYLTLNNGSQAVGRSSFYCLEYFPSQMLRTGNNFEFSYTFEDVPFHSSYAHSQSLDRLMNPLIDQYLYYLSRTQSTGGTAGTQQLLFSQAGPXNMSAQAKNWLPGPCYRQQRVSTTLSQNNNSNFAWTGATKYHLNGRDSLVNPGVAMATHKDDEERFFPSSGVLMFGKQGAGKDNVDYSSVMLTSEEEIKTTNPVATEQYGVVADNLQQQNTAPIVGAVNSQGALPGMVWQNRDVYLQGPIWAKIPHTDGNFHPSPLMGGFGLKHPPPQILIKNTPVPADPPTTFSQAKLASFITQYSTGQVSVEIEWELQKENSKRWNPEIQYTSNYYKSTNVDFAVNTEGTYSEPRPIGTRYLTRNL

SEQ ID NO: 1328 - DNA, 2214 bp, Artificial Sequence
  Synthetic polynucleotide
  modified_base (1411)..(1413): a, c, t, or g
  misc_feature (1411)..(1413): n is a, c, g, or t
atggctgccgatggttatcttccagattggctcgaggacaacctctctgagggcattcgcgagtggtgggacttgaaacctggagccccgaaacccaaagccaaccagcaaaagcaggacgacggccggggtctggtgcttcctggctacaagtacctcggacccttcaacggactcgacaagggggagcccgtcaacgcggcggacgcagcggccctcgagcacgacaaggcctacgaccagcagctcaaagcgggtgacaatccgtacctgcggtataaccacgccgacgccgagtttcaggagcgtctgcaagaagatacgtcttttgggggcaacctcgggcgagcagtcttccaggccaagaagcgggttctcgaacctctcggtctggttgaggaaggcgctaagacggctcctggaaagaagagaccggtagagccatcaccccagcgttctccagactcctctacgggcatcggcaagaaaggccagcagcccgcgaaaaagagactcaactttgggcagactggcgactcagagtcagtgcccgaccctcaaccaatcggagaaccccccgcaggcccctctggtctgggatctggtacaatggctgcaggcggtggcgctccaatggcagacaataacgaaggcgccgacggagtgggtagttcctcaggaaattggcattgcgattccacatggctgggcgacagagtcatcaccaccagcacccgaacctgggccctccccacctacaacaaccacctctacaagcaaatctccaacgggacttcgggaggaagcaccaacgacaacacctacttcggctacagcaccccctgggggtattttgactttaacagattccactgccacttctcaccacgtgactggcagcgactcatcaacaacaactggggattccggcccaagagactcaacttcaagctcttcaacatccaggtcaaggaggtcacgcagaatgaaggcaccaagaccatcgccaataaccttaccagcacgattcaggtctttacggactcggaataccagctcccgtacgtcctcggctctgcgcaccagggctgcctgcctccgttcccggcggacgtcttcatgattcctcagtacgggtacctgactctgaacaatggcagtcaggccgtgggccgttcctccttctactgcctggagtactttccttctcaaatgctgagaacgggcaacaactttgagttcagctacacgtttgaggacgtgccttttcacagcagctacgcgcacagccaaagcctggaccggctgatgaaccccctcatcgaccagtacctgtactacctgtctcggactcagtccacgggaggtaccgcaggaactcagcagttgctattttctcaggccgggcctnnnaacatgtcggctcaggccaaaaactggctacccgggccctgctaccggcagcaacgcgtctccacgacactgtcgcaaaataacaacagcaactttgcctggaccggtgccaccaagtatcatctgaatggcagagactctctggtaaatcccggtgtcgctatggcaacccacaaggacgacgaagagcgattttttccgtccagcggagtcttaatgtttgggaaacagggagctggaaaagacaacgtggactatagcagcgttatgctaaccagtgaggaagaaattaaaaccaccaacccagtggccacagaacagtacggcgtggtggccgataacctgcaacagcaaaacaccgctcctattgtaggggccgtcaacagtcaaggagccttacctggcatggtctggcagaaccgggacgtgtacctgcagggtcctatctgggccaagattcctcacacggacggaaactttcatccctcgccgctgatgggaggctttggactgaaacacccgcctcctcagatcctgattaagaatacacctgttcccgcggatcctccaactaccttcagtcaagctaagctggcgtcgttcatcacgcagtacagcaccggacaggtcagcgtggaaattgaatgggagctgcagaaagaaaacagcaaacgctggaacccagagattcaatacacttccaactactacaaatctacaaatgtggactttgctgttaacacagaaggcacttattctgagcctcgccccatcggcacccgttacctcacccgtaatctg

SEQ ID NO: 1329 - protein, 737 aa, Artificial Sequence
  Synthetic polypeptide
  MOD_RES (148)..(148): Any naturally occurring amino acid
  MOD_RES (169)..(169): Any naturally occurring amino acid
  MOD_RES (314)..(314): Any naturally occurring amino acid
  MOD_RES (466)..(466): Any naturally occurring amino acid
  MOD_RES (563)..(563): Any naturally occurring amino acid
  MOD_RES (580)..(580): Any naturally occurring amino acid
  MOD_RES (588)..(588): Any naturally occurring amino acid
MAADGYLPDWLEDNLSEGIREWWDLKPGAPKPKANQQKQDDGRGLVLPGYKYLGPFNGLDKGEPVNAADAAALEHDKAYDQQLKAGDNPYLRYNHADAEFQERLQEDTSFGGNLGRAVFQAKKRVLEPLGLVEEGAKTAPGKKRPVEXSPQRSPDSSTGIGKKGQQPAXKRLNFGQTGDSESVPDPQPLGEPPAAPSGVGSGTMAAGGGAPMADNNEGADGVGNASGNWHCDSTWLGDRVITTSTRTWALPTYNNHLYKQISSQSAGSTNDNTYFGYSTPWGYFDFNRFHCHFSPRDWQRLINNNWGFRPKKLXFKLFNIQVKEVTTNDGVTTIANNLTSTVQVFSDSEYQLPYVLGSAHQGCLPPFPADVFMIPQYGYLTLNNGSQSVGRSSFYCLEYFPSQMLRTGNNFEFSYTFEDVPFHSSYAHSQSLDRLMNPLIDQYLYYLARTQSTTGGTAGNRELQFXQAGPSTMAEQAKNWLPGPCYRQQRVSKTLDQNNNSNFAWTGATKYHLNGRNSLVNPGVAMATHKDDEDRFFPSSGVLIFGKTGAANKTTLENVLMTXEEEIKTTNPVATEEYGXVSSNLQSXNTAPQTQTVNSQGALPGMVWQNRDVYLQGPIWAKIPHTDGNFHPSPLMGGFGLKHPPPQILIKNTPVPANPPEVFTPAKFASFITQYSTGQVSVEIEWELQKENSKRWNPEIQYTSNYDKSTNVDFAVDSEGVYSEPRPIGTRYLTRNL

SEQ ID NO: 1330 - DNA, 2211 bp, Artificial Sequence
  Synthetic polynucleotide
  modified_base (442)..(444): a, c, t, or g
  misc_feature (442)..(444): n is a, c, g, or t
  modified_base (505)..(507): a, c, t, or g
  misc_feature (505)..(507): n is a, c, g, or t
  modified_base (940)..(942): a, c, t, or g
  misc_feature (940)..(942): n is a, c, g, or t
  modified_base (1396)..(1398): a, c, t, or g
  misc_feature (1396)..(1398): n is a, c, g, or t
  modified_base (1687)..(1689): a, c, t, or g
  misc_feature (1687)..(1689): n is a, c, g, or t
  modified_base (1738)..(1740): a, c, t, or g
  misc_feature (1738)..(1740): n is a, c, g, or t
  modified_base (1762)..(1764): a, c, t, or g
  misc_feature (1762)..(1764): n is a, c, g, or t
atggctgccgatggttatcttccagattggctcgaggacaacctctctgagggcattcgcgagtggtgggacctgaaacctggagccccgaaacccaaagccaaccagcaaaagcaggacgacggccggggtctggtgcttcctggctacaagtacctcggacccttcaacggactcgacaagggggagcccgtcaacgcggcggacgcagcggccctcgagcacgacaaggcctacgaccagcagctcaaagcgggtgacaatccgtacctgcggtataaccacgccgacgccgagtttcaggagcgtctgcaagaagatacgtcatttgggggcaacctcgggcgagcagtcttccaggccaagaagcgggttctcgaacctctcggtctggttgaggaaggcgctaagacggctcctggaaagaagagaccggtagagnnntcacctcagcgttcccccgactcctccacgggcatcggcaagaaaggccagcagcccgccnnnaagagactcaatttcggtcagactggcgactcagagtcagtccccgaccctcaacctctcggagaacctccagcagcgccctctggtgtgggatctggtacaatggctgcaggcggtggcgcaccaatggcagacaataacgaaggtgccgacggagtgggtaatgcctcaggaaattggcattgcgattccacatggctgggcgacagagtcattaccaccagcacccgaacctgggccctgcccacctacaacaaccacctctacaagcaaatctccagtcaaagtgcaggtagtaccaacgacaacacctacttcggctacagcaccccctgggggtattttgactttaacagattccactgccacttctcaccacgtgactggcagcgactcatcaacaacaactggggattccggcccaagaagctgnnnttcaagctcttcaacatccaggtcaaggaggtcacgacgaatgacggcgttacgaccatcgctaataaccttaccagcacggttcaggtattctcggactcggaataccagctgccgtacgtcctcggctctgcgcaccagggctgcctgcctccgttcccggcggacgtcttcatgattcctcagtacggctacctgactctcaacaatggcagtcagtctgtgggacgttcctccttctactgcctggagtacttcccctctcagatgctgagaacgggcaacaactttgagttcagctacaccttcgaggacgtgcctttccacagcagctacgcacacagccagagcctggaccggctgatgaatcccctcatcgaccagtacttgtactacctggccagaacacagagtaccacaggaggcacagctggcaatcgggaactgcagtttnnncaggccgggccttcaactatggccgaacaagccaagaattggttacctggaccttgctaccggcaacaaagagtctccaaaacgctggatcaaaacaacaacagcaactttgcttggactggtgccaccaaatatcacctgaacggcagaaactcgttggttaatcccggcgtcgccatggcaactcacaaggacgacgaggaccgctttttcccatccagcggagtcctgatttttggaaaaactggagcagctaacaaaactacattggaaaatgtgttaatgacannngaagaagaaattaaaactactaatcctgtagccacggaagaatacgggnnngtcagcagcaacttacaatcgnnnaatactgcaccccagacacaaactgtcaacagccagggagccttacctggcatggtctggcagaaccgggacgtgtacctgcagggtcccatctgggccaagattcctcacacggatggcaactttcacccgtctcctttgatgggcggctttggacttaaacatccgcctcctcagatcctgatcaagaacactcccgttcccgctaatcctccggaggtgtttactcctgccaagtttgcttcgttcatcacacagtacagcaccggacaagtcagcgtggaaatcgagtgggagctgcagaaggaaaacagcaagcgctggaacccggagattcagtacacctccaactatgataagtcgactaatgtggactttgccgttgacagcgagggtgtttactctgagcctcgccctattggcactcgttacctcacccgtaatctg

SEQ ID NO: 1331 - protein, 735 aa, Artificial Sequence
  Synthetic polypeptide
  MOD_RES (162)..(162): Any naturally occurring amino acid
  MOD_RES (168)..(168): Any naturally occurring amino acid
  MOD_RES (224)..(224): Any naturally occurring amino acid
  MOD_RES (310)..(310): Any naturally occurring amino acid
  MOD_RES (410)..(410): Any naturally occurring amino acid
  MOD_RES (446)..(446): Any naturally occurring amino acid
  MOD_RES (461)..(461): Any naturally occurring amino acid
  MOD_RES (471)..(471): Any naturally occurring amino acid
  MOD_RES (708)..(708): Any naturally occurring amino acid
MAADGYLPDWLEDNLSEGIREWWDLKPGAPKPKANQQKQDDGRGLVLPGYKYLGPFNGLDKGEPVNAADAAALEHDKAYDQQLKAGDNPYLRYNHADAEFQERLQEDTSFGGNLGRAVFQAKKRVLEPLGLVEEGAKTAPGKKRPVEQSPQEPDSSSGIGKXGQQPAXKRLNFGQTGDSESVPDPQPLGEPPAAPSGVGSNTMASGGGAPMADNNEGADGVGNXSGNWHCDSTWLGDRVITTSTRTWALPTYNNHLYKQISSQSGASNDNHYFGYSTPWGYFDFNRFHCHFSPRDWQRLINNNWGFRPKXLNFKLFNIQVKEVTTNDGTTTIANNLTSTVQVFTDSEYQLPYVLGSAHQGCLPPFPADVFMIPQYGYLTLNNGSQAVGRSSFYCLEYFPSQMLRTGNNFXFSYTFEDVPFHSSYAHSQSLDRLMNPLIDQYLYYLXRTQTTSGTAQNRELXFSQAGPSSMXNQAKNWLPGPCYRQQRVSKTANDNNNSNFAWTGATKYHLNGRDSLVNPGPAMASHKDDEDKFFPMSGVLIFGKQGAGASNVDLDNVMITDEEEIKTTNPVATEQYGTVATNLQSSNTAPATGTVNSQGALPGMVWQDRDVYLQGPIWAKIPHTDGHFHPSPLMGGFGLKHPPPQILIKNTPVPANPPTTFSPAKFASFITQYSTGQVSVEIEWELQKENSKRWNPEIQYTSNYNKSXNVDFTVDTNGVYSEPRPIGTRYLTRNL

SEQ ID NO: 1332 - DNA, 2205 bp, Artificial Sequence
  Synthetic polynucleotide
  modified_base (484)..(486): a, c, t, or g
  misc_feature (484)..(486): n is a, c, g, or t
  modified_base (502)..(504): a, c, t, or g
  misc_feature (502)..(504): n is a, c, g, or t
  modified_base (670)..(672): a, c, t, or g
  misc_feature (670)..(672): n is a, c, g, or t
  modified_base (928)..(930): a, c, t, or g
  misc_feature (928)..(930): n is a, c, g, or t
  modified_base (1228)..(1230): a, c, t, or g
  misc_feature (1228)..(1230): n is a, c, g, or t
  modified_base (1336)..(1338): a, c, t, or g
  misc_feature (1336)..(1338): n is a, c, g, or t
  modified_base (1381)..(1383): a, c, t, or g
  misc_feature (1381)..(1383): n is a, c, g, or t
  modified_base (1411)..(1413): a, c, t, or g
  misc_feature (1411)..(1413): n is a, c, g, or t
  modified_base (2122)..(2124): a, c, t, or g
  misc_feature (2122)..(2124): n is a, c, g, or t
atggctgccgatggttatcttccagattggctcgaggacaacctctctgagggcattcgcgagtggtgggacttgaaacctggagccccgaaacccaaagccaaccagcaaaagcaggacgacggccggggtctggtgcttcctggctacaagtacctcggacccttcaacggactcgacaagggggagcccgtcaacgcggcggatgcagcggccctcgagcacgacaaggcctacgaccagcagctcaaagcgggtgacaatccgtacctgcggtataaccacgccgacgccgagtttcaggagcgtctgcaagaagatacgtcttttgggggcaacctcgggcgagcagtcttccaggccaagaagagggttctcgaacctcttggtctggttgaggaaggtgctaagacggctcctggaaagaaacgtccggtagagcagtcgccacaagagccagactcctcctcgggcattggcaagnnnggccagcagcccgctnnnaagagactcaattttggtcagactggcgactcagagtcagtccccgacccacaacctctcggagaacctccagcagccccctctggtgtgggatctaatacaatggcttcaggcggtggcgcaccaatggcagacaataacgaaggcgccgacggagtgggtaatnnntcaggaaattggcattgcgattccacatggctgggcgacagagtcatcaccaccagcacccgaacatgggccttgcccacctataacaaccacctctacaagcaaatctccagtcaatcaggggccagcaacgacaaccactacttcggctacagcaccccctgggggtattttgatttcaacagattccactgccatttctcaccacgtgactggcagcgactcatcaacaacaattggggattccggcccaagnnnctcaacttcaagctcttcaacatccaagtcaaggaggtcacgacgaatgatggcaccacgaccatcgctaataaccttaccagcacggttcaagtcttcacggactcggagtaccagttgccgtacgtcctcggctctgcgcaccagggctgcctccctccgttcccggcggacgtgttcatgattccgcagtacggctacctaacgctcaacaatggcagccaggcagtgggacggtcatccttttactgcctggaatatttcccatcgcagatgctgagaacgggcaataactttnnnttcagctacaccttcgaggacgtgcctttccacagcagctacgcgcacagccagagcctggaccggctgatgaatcctctcatcgaccagtacctgtattacctgnnnagaactcagactacgtccggaactgcccaaaacagggagttgnnntttagccaggcgggtccatctagcatgnnnaatcaggccaaaaactggctacctggaccctgttaccggcagcagcgcgtttctaaaacagcaaatgacaacaacaacagcaactttgcctggactggtgctacaaaatatcaccttaatgggcgtgattctttagtcaaccctggccctgctatggcctcacacaaagacgacgaagacaagttctttcccatgagcggtgtcttgatttttggaaagcagggcgccggagcttcaaacgttgatttggacaatgtcatgatcacagacgaagaggaaatcaaaaccactaaccccgtggccaccgaacaatatgggactgtggcaaccaatctccagagcagcaacacagcccctgcgaccggaactgtgaattctcagggagccttacctggaatggtgtggcaagacagagacgtatacctgcagggtcctatttgggccaaaattcctcacacggatggacactttcacccgtctcctctcatgggcggctttggacttaagcacccgcctcctcagatcctcatcaaaaacacgcctgttcctgcgaatcctccgacaacgttttcgcctgcaaagtttgcttcattcatcacccagtattccacaggacaagtgagcgtggagattgaatgggagctgcagaaagaaaacagcaaacgctggaatcccgaaatacagtatacatctaactataataaatctnnnaacgttgatttcactgtggacaccaatggagtttatagtgagcctcgccccattggcacccgttacctcacccgtaacctg

SEQ ID NO: 1333 - protein, 735 aa, Artificial Sequence
  Synthetic polypeptide
  MOD_RES (42)..(42): Any naturally occurring amino acid
  MOD_RES (168)..(168): Any naturally occurring amino acid
  MOD_RES (310)..(310): Any naturally occurring amino acid
  MOD_RES (410)..(410): Any naturally occurring amino acid
  MOD_RES (446)..(446): Any naturally occurring amino acid
  MOD_RES (461)..(461): Any naturally occurring amino acid
  MOD_RES (471)..(471): Any naturally occurring amino acid
  MOD_RES (475)..(475): Any naturally occurring amino acid
  MOD_RES (504)..(504): Any naturally occurring amino acid
  MOD_RES (539)..(539): Any naturally occurring amino acid
MAADGYLPDWLEDNLSEGIREWWDLKPGAPQPKANQQHQDDXRGLVLPGYKYLGPFNGLDKGEPVNEADAAALEHDKAYDQQLKAGDNPYLKYNHADAEFQERLQEDTSFGGNLGRAVFQAKKRVLEPLGLVEEAAKTAPGKKRPVEQSPQEPDSSSGIGKSGQQPAXKRLNFGQTGDSESVPDPQPLGEPPAAPSGVGSNTMASGGGAPMADNNEGADGVGNSSGNWHCDSTWLGDRVITTSTRTWALPTYNNHLYKQISSQSGASNDNHYFGYSTPWGYFDFNRFHCHFSPRDWQRLINNNWGFRPKXLNFKLFNIQVKEVTQNDGTTTIANNLTSTVQVFTDSEYQLPYVLGSAHQGCLPPFPADVFMIPQYGYLTLNNGSQAVGRSSFYCLEYFPSQMLRTGNNFXFSYTFEDVPFHSSYAHSQSLDRLMNPLIDQYLYYLXRTQTTSGTTQQSRLXFSQAGPSSMXQQAXNWLPGPCYRQQRVSKTANDNNNSNFAWTXATKYHLNGRDSLVNPGPAMASHKDDEEKFFPMHGXLIFGKQGTGASNVDLDNVMITDEEEIRTTNPVATEQYGTVATNLQSSNTAPATGTVNSQGALPGMVWQDRDVYLQGPIWAKIPHTDGHFHPSPLMGGFGLKHPPPQILIKNTPVPANPPTTFSPAKFASFITQYSTGQVSVEIEWELQKENSKRWNPEIQYTSNYNKSVNVDFTVDTNGVYSEPRPIGTRYLTRNL

SEQ ID NO: 1334 - DNA, 2205 bp, Artificial Sequence
  Synthetic polynucleotide
  modified_base (124)..(126): a, c, t, or g
  misc_feature (124)..(126): n is a, c, g, or t
  modified_base (502)..(504): a, c, t, or g
  misc_feature (502)..(504): n is a, c, g, or t
  modified_base (928)..(930): a, c, t, or g
  misc_feature (928)..(930): n is a, c, g, or t
  modified_base (1228)..(1230): a, c, t, or g
  misc_feature (1228)..(1230): n is a, c, g, or t
  modified_base (1336)..(1338): a, c, t, or g
  misc_feature (1336)..(1338): n is a, c, g, or t
  modified_base (1381)..(1383): a, c, t, or g
  misc_feature (1381)..(1383): n is a, c, g, or t
  modified_base (1411)..(1413): a, c, t, or g
  misc_feature (1411)..(1413): n is a, c, g, or t
  modified_base (1423)..(1425): a, c, t, or g
  misc_feature (1423)..(1425): n is a, c, g, or t
  modified_base (1510)..(1512): a, c, t, or g
  misc_feature (1510)..(1512): n is a, c, g, or t
  modified_base (1615)..(1617): a, c, t, or g
  misc_feature (1615)..(1617): n is a, c, g, or t
atggctgctgacggttatcttccagattggctcgaggacaacctttctgaaggcattcgtgagtggtgggatctgaaacctggagcccctcaacccaaagcgaaccaacaacaccaggacgacnnncggggtcttgtgcttccgggttacaaatacctcggaccctttaacggactcgacaaaggagagccggtcaacgaggcggacgcggcagccctcgaacacgacaaagcttacgaccagcagctcaaggccggtgacaacccgtacctcaagtacaaccacgccgacgccgagtttcaggagcgtcttcaagaagatacgtcttttgggggcaaccttggcagagcagtcttccaggccaaaaagagggtccttgagcctcttggtctggttgaggaagcagctaaaacggctcctggaaagaagaggcctgtagaacagtctcctcaggaaccggactcatcatctggtattggcaaatcgggccaacagcctgccnnnaaaagactaaatttcggtcagactggagactcagagtcagtcccagaccctcaacctctcggagaaccaccagcagccccctcaggtgtgggatctaatacaatggcttcaggcggtggcgcaccaatggcagacaataacgagggtgccgatggagtgggtaattcctcaggaaattggcattgcgattccacatggctgggcgacagagtcatcaccaccagcaccagaacctgggccctgcccacttacaacaaccatctctacaagcaaatctccagccaatcaggagcttcaaacgacaaccactactttggctacagcaccccttgggggtattttgactttaacagattccactgccacttctcaccacgtgactggcagcgactcattaacaacaactggggattccggcccaagnnnctcaacttcaagctcttcaacatccaagttaaagaggtcacgcagaacgatggcacgacgactattgccaataaccttaccagcacggttcaagtgtttacggactcggagtatcagctcccgtacgtgctcgggtcggcgcaccaaggctgtctcccgccgtttccagcggacgtcttcatgatccctcagtatggatacctcaccctgaacaacggaagtcaagcggtgggacgctcatccttttactgcctggagtacttcccttcgcagatgctaaggactggaaataacttcnnnttcagctataccttcgaggatgtaccttttcacagcagctacgctcacagccagagtttggatcgcttgatgaatcctcttattgatcagtatctgtactacctgnnnagaacgcaaacaacctctggaacaacccaacaatcacggctgnnntttagccaggctgggccttcgtctatgnnncagcaggccnnnaattggctacctgggccctgctaccggcaacagagagtttcaaagactgctaacgacaacaacaacagtaactttgcttggacannngccaccaaatatcatctcaatggccgcgactcgctggtgaatccaggaccagctatggccagtcacaaggacgatgaagaaaaatttttccctatgcacggcnnnctaatatttggcaaacaagggacaggggcaagtaacgtagatttagataatgtaatgattacggatgaagaagagattcgtaccaccaatcctgtggcaacagagcagtatggaactgtggcaactaacttgcagagctcaaatacagctcccgcgactggaactgtcaatagtcagggggccttacctggcatggtgtggcaagatcgtgacgtgtaccttcaaggacctatctgggcaaagattcctcacacggatggacactttcatccttctcctctgatgggaggctttggactgaaacatccgcctcctcaaatcttgatcaaaaatactccggtaccggcaaatcctccgacgactttcagcccggccaagtttgcttcatttatcactcagtactccactggacaggtcagcgtggaaattgagtgggagctacagaaagaaaacagcaaacgttggaatccagagattcagtacacttccaactacaacaagtctgttaatgtggactttactgtagacactaatggtgtttatagtgaacctcgccctattggaacccggtatctcacacgaaacttg

SEQ ID NO: 1335 - protein, 736 aa, Artificial Sequence; identical to SEQ ID NO: 1043
  Synthetic polypeptide

SEQ ID NO: 1336 - protein, 736 aa, Artificial Sequence; identical to SEQ ID NO: 1044
  Synthetic polypeptide

SEQ ID NO: 1337 - protein, 736 aa, Artificial Sequence; identical to SEQ ID NO: 1045
  Synthetic polypeptide

SEQ ID NO: 1338 - protein, 736 aa, Artificial Sequence; identical to SEQ ID NO: 1046
  Synthetic polypeptide

SEQ ID NO: 1339 - protein, 736 aa, Artificial Sequence; identical to SEQ ID NO: 1047
  Synthetic polypeptide

SEQ ID NO: 1340 - protein, 736 aa, Artificial Sequence; identical to SEQ ID NO: 1048
  Synthetic polypeptide

SEQ ID NO: 1341 - protein, 736 aa, Artificial Sequence; identical to SEQ ID NO: 1049
  Synthetic polypeptide

SEQ ID NO: 1342 - protein, 736 aa, Artificial Sequence; identical to SEQ ID NO: 1050
  Synthetic polypeptide

SEQ ID NO: 1343 - DNA, 2211 bp, Artificial Sequence; identical to SEQ ID NO: 1051
  Synthetic polynucleotide

SEQ ID NO: 1344 - protein, 738 aa, Artificial Sequence; identical to SEQ ID NO: 12
  Synthetic polypeptide

SEQ ID NO: 1345 - protein, 738 aa, Artificial Sequence; identical to SEQ ID NO: 12
  Synthetic polypeptide

SEQ ID NO: 1346 - protein, 738 aa, Artificial Sequence
  Synthetic polypeptide
  MOD_RES (157)..(157): Any naturally occurring amino acid
  MOD_RES (169)..(169): Any naturally occurring amino acid
  MOD_RES (457)..(457): Any naturally occurring amino acid
  MOD_RES (463)..(463): Any naturally occurring amino acid
  MOD_RES (508)..(508): Any naturally occurring amino acid
  MOD_RES (510)..(511): Any naturally occurring amino acid
  MOD_RES (558)..(558): Any naturally occurring amino acid
  MOD_RES (585)..(585): Any naturally occurring amino acid
  MOD_RES (587)..(587): Any naturally occurring amino acid
MAADGYLPDWLEDNLSEGIREWWDLKPGAPKPKANQQKQDDGRGLVLPGYKYLGPFNGLDKGEPVNAADAAALEHDKAYDQQLKAGDNPYLRYNHADAEFQERLQEDTSFGGNLGRAVFQAKKRVLEPLGLVEEGAKTAPGKKRPVEQSPQEPDSSXLGIGKTGQQPAXKRLNFGQTGDSESVPDPQPLGEPPAAPSGVGSNTMASGGGAPMADNNEGADGVGNSSGNWHCDSTWLGDRVITTSTRTWALPTYNNHLYKQISNGTSGGSTNDNTYFGYSTPWGYFDFNRFHCHFSPRDWQRLINNNWGFRPKRLNFKLFNIQVKEVTTNEGTKTIANNLTSTVQVFTDSEYQLPYVLGSAHQGCLPPFPADVFMIPQYGYLTLNNGSQAVGRSSFYCLEYFPSQMLRTGNNFQFSYTFEDVPFHSSYAHSQSLDRLMNPLIDQYLYYLSRTQTTGTXGTQTLXFSQAGPSSMANQARNWVPGPCYRQQRVSTTTNQNNNSNFAWTGAXKXXLNGRDSLMNPGVAMASHKDDEDRFFPSSGVLIFGKQGAGNDNVDYSXVMITNEEEIKTTNPVATEEYGAVATNXQXLANTQAQTGLVHNQGVLPGMVWQNRDVYLQGPIWAKIPHTDGNFHPSPLMGGFGLKHPPPQILIKNTPVPADPPTTFNQAKLNSFITQYSTGQVSVEIEWELQKENSKRWNPEIQYTSNYYKSTNVDFAVNTEGVYSEPRPIGTRYLTRNL

SEQ ID NO: 1347 - DNA, 2211 bp, Artificial Sequence
  Synthetic polynucleotide
  modified_base (469)..(471): a, c, t, or g
  misc_feature (469)..(471): n is a, c, g, or t
  modified_base (502)..(504): a, c, t, or g
  misc_feature (502)..(504): n is a, c, g, or t
  modified_base (1366)..(1368): a, c, t, or g
  misc_feature (1366)..(1368): n is a, c, g, or t
  modified_base (1384)..(1386): a, c, t, or g
  misc_feature (1384)..(1386): n is a, c, g, or t
  modified_base (1519)..(1521): a, c, t, or g
  misc_feature (1519)..(1521): n is a, c, g, or t
  modified_base (1525)..(1530): a, c, t, or g
  misc_feature (1525)..(1530): n is a, c, g, or t
  modified_base (1669)..(1671): a, c, t, or g
  misc_feature (1669)..(1671): n is a, c, g, or t
  modified_base (1750)..(1752): a, c, t, or g
  misc_feature (1750)..(1752): n is a, c, g, or t
  modified_base (1756)..(1758): a, c, t, or g
  misc_feature (1756)..(1758): n is a, c, g, or t
atggctgccgatggttatcttccagattggctcgaggacaacctctctgagggcattcgcgagtggtgggacttgaaacctggagccccgaaacccaaagccaaccagcaaaagcaggacgacggccggggtctggtgcttcctggctacaagtacctcggacccttcaacggactcgacaagggggagcccgtcaacgcggcggacgcagcggccctcgagcacgacaaagcctacgaccagcagctcaaagcgggtgacaatccgtacctgcggtataatcacgccgacgccgagtttcaggagcgtctgcaagaagatacgtcttttgggggcaacctcgggcgagcagtcttccaggccaagaagcgggttctcgaacctctcggtctggttgaggaaggcgctaagacggctcctggaaagaagaggccggtagagcagtcgccacaagagccagactcctccnnnggcatcggcaagacaggccagcagcccgctnnnaagagactcaattttggtcagactggcgactcagagtcagtccccgacccacaacctctcggagaacctccagcagccccctcaggtgtgggatctaatacaatggcttcaggcggtggcgctccaatggcagacaataacgaaggcgccgacggagtgggtaattcctcgggaaattggcattgcgattccacatggctgggggacagagtcatcaccaccagcacccgaacctgggccctgcccacctacaacaaccacctctacaagcaaatctccaacggcacctcgggaggaagcaccaacgacaacacctattttggctacagcaccccctgggggtattttgacttcaacagattccactgtcacttttcaccacgtgactggcaacgactcatcaacaacaattggggattccggcccaaaagactcaacttcaagctgttcaacatccaggtcaaggaagtcacgacgaacgaaggcaccaagaccatcgccaataatctcaccagcaccgtgcaggtctttacggactcggagtaccagttaccgtacgtgctaggatccgctcaccagggatgtctgcctccgttcccggcggacgtcttcatgattcctcagtacggctatttaactttaaacaatggaagccaagccgtgggacgttcctccttctactgtctggagtatttcccatcgcagatgctgagaaccggcaacaactttcagttcagctacaccttcgaggacgtgcctttccacagcagctacgcgcacagccagagcctggacaggctgatgaatcccctcatcgaccagtacctgtactacctgtccagaacgcaaacgactggaactnnngggacgcagactctgnnnttcagccaagcgggtcctagctcaatggccaaccaggctagaaattgggtgcccggaccttgctaccggcagcagcgcgtctccacgacaaccaaccagaacaacaacagcaactttgcctggacgggagctnnnaagnnnnnnctgaacggccgagactctctaatgaatccgggcgtggcaatggcttcccacaaggatgacgaggaccgcttcttcccttcgagcggggtcctgatttttggcaagcaaggagccgggaacgataatgtggattacagcnnngtgatgattacaaatgaggaagaaatcaagactaccaaccccgtggccacagaagaatatggagcagtggccaccaacnnncagnnngccaatacgcaggcgcagaccggactcgtgcacaaccagggggtgcttcccggcatggtgtggcagaatagagacgtgtacctgcagggtcccatctgggccaaaattcctcacacggacggcaactttcacccgtctcccctgatgggcggctttggactgaagcacccgcctcctcaaattctcatcaagaacacaccggttccagcggacccgccgactaccttcaaccaggccaagctgaactctttcatcacgcagtacagcaccggacaggtcagcgtggaaatcgagtgggagctgcagaaagaaaacagcaaacgctggaatccagagattcaatacacttccaactactacaaatctacaaatgtggactttgctgtcaacacggagggggtttatagcgagcctcgccccattggcacccgttacctcacccgcaacctgtaa

SEQ ID NO: 1348 - protein, 733 aa, Artificial Sequence; identical to SEQ ID NO: 428
  Synthetic polypeptide

SEQ ID NO: 1349 - DNA, 4472 bp, Artificial Sequence
  Synthetic polynucleotide
ctccatcactaggggtaaccgcgaagcgcctcccacgctgccgcgtcagcgctgacgtaaattacgtcataggggagtggtcctgtattagctgtcacgtgagtgcttttgcgacattttgcgacaccacgtggccattcatggtatatatggccgagtgagcgagcaggatctccattttgaccgcgaaatttgaacgagcagcagccatgccgggcttctacgagatcgtgcttaaggtgccgagcgacctggacgagcacctgccgggcatttctgactcgtttgtgaactgggtggcagagaaggaatgggagctgcccccggattctgacatggatcggaatctgattgagcaggcacccctgaccgtggccgagaagctacagcgcgacttcctggtccaatggcgccgcgtgagtaaggccccggaggccctcttctttgttcagttcgagaagggcgagtcctacttccacctccatattctggtagagaccacgggggtcaaatccatggtgctgggccgcttcctgagtcagattcgggacaagctggtgcagaccatctaccgcgggatcgagccgaccctgcccaactggttcgcggtgacaaagacgcgtaatggcgccggaggggggaacaaggtggtggacgagtgctacatccccaactacctgctgcccaagactcagcccgagctgcagtgggcgtggactaacatggaggagtatataagcgcgtgcttgaacctggccgagcgcaaacggctcgtggcgcagcacctgacccacgtcagccagacccaggagcagaacaaggagaatctgaacccgaattctgacgcgcctgtcatccggtcaaaaacctccgcgcgctacatggagctggtcgggtggctggtggaccggggcatcacctccgagaagcagtggatccaggaggaccaggcctcgtacatctccttcaacgccgcctccaactcgcggtctcagatcaaggccgcgctggacaatgccggcaagatcatggcgctgaccaaatccgcgcccgactacctggtaggccccgctctgcccgcggacattaaatccaaccgcatctaccgcatcctggagctgaatggctacgaccctgcctacgccggttccgtctttctcggctgggcccagaaaaagtttggcaaaaggaacaccatctggctgtttgggccggccaccacgggcaagaccaacatcgcggaagccatcgcccacgccgtgcccttctacggctgcgtcaactggaccaatgagaactttcccttcaacgattgcgtcgacaagatggtgatctggtgggaggagggcaagatgacggccaaggtcgtggagtccgccaaggccattctcggcggcagcaaggtgcgcgtggaccaaaagtgcaagtcgtccgcccagatcgatcccacccccgtgatcgtcacctccaacaccaacatgtgcgccgtgattgacgggaacagcaccaccttcgagcaccagcagccgttgcaggaccggatgttcaaatttgaacttacccgccgtctggagcacgactttggcaaggtgacaaagcaggaagtcaaagagttcttccgctgggcgcaggatcacgtgaccgaggtggcgcatgagttctacgtcagaaagggtggagctaacaaaagacccgcccccgatgacgcggatataagcgagcccaagcgggcctgcccctcagtcgcggatccatcgacgtcagacgcggaaggagctccggtggactttgccgacaggtaccaaaacaaatgttctcgtcacgcgggcatgcttcagatgctgtttccctgcaaaacatgcgagagaatgaatcagaatttcaacatttgcttcacgcacgggaccagagactgttcagaatgtttccctggcgtgtcagaatctcaaccggtcgtcagaaaaaagacgtatcggaaactctgtgcgattcatcatctgctggggcgggcacccgagattgcttgctcggcctgcgacctggtcaacgtggacctggatgactgtgtttctgagcaataaatgacttaaaccaggtatggctgccgatggttatcttccagattggctcgaggacaacctctctgagggcattcgcgagtggtgggacctgaaacctggagccccgaaacccaaagccaaccagcaaaagcaggacaacggccggggtctggtgcttcctggctacaagtacctcggacccttcaacggactcgacaagggggagcccgtcaacgcggcggacgcagcggccctcgagcacgacaaggcctacgaccagcagctccaagcgggtgacaatccgtacctgcggtataatcacgccgacgccgagtttcaggagcgtctgcaagaagatacgtcttttgggggcaacctcgggcgcgcagtcttccaggccaaaaagcgggttctcgaacctctgggcctggttgaatcgccggttaagacggctcctggaaagaagagaccggtagagccatcaccccagcgctctccagactcctctacgggcatcggcaagaaaggccagcagcccgcaaaaaagagactcaattttgggcagactggcgactcagagtcagtccccgaccctcaaccaatcggagaaccaccagcaggcccctctggtctgggatctggtacaatggctgcaggcggtggcgctccaatggcagacaataacgaaggcgccgacggagtgggtagttcctcaggaaattggcattgcgattccacatggctgggcgacagagtcatcaccaccagcacccgcacctgggccctgcccacctacaacaaccacctctacaagcaaatctccaacgggacctcgggaggaagcaccaacgacaacacctacttcggctacagcaccccctgggggtattttgacttcaacagattccactgccacttttcaccacgtgactggcagcgactcatcaacaacaactggggattccggcccaagaggctcaacttcaagctcttcaacatccaagtcaaggaggtcacgcagaatgaaggcaccaagaccatcgccaataaccttaccagcacgattcaggtctttacggactcggaataccagctcccgtacgtgctcggctcggcgcaccagggctgcctgcctccgttcccggcggacgtcttcatgattcctcagtacgggtacctgactctgaacaatggcagtcaggctgtgggccggtcgtccttctactgcctggagtactttccttctcaaatgctgagaacgggcaacaactttgaattcagctacaacttcgaggacgtgcccttccacagcagctacgcgcacagccagagcctggaccggctgatgaaccctctcatcgaccagtacttgtactacctgtcccggactcaaagcacgggcggtactgcaggaactcagcagttgctattttctcaggccgggcctaacaacatgtcggctcaggccaagaactggctacccggtccctgctaccggcagcaacgcgtctccacgacactgtcgcagaacaacaacagcaactttgcctggacgggtgccaccaagtatcatctgaatggcagagactctctggtgaatcctggcgttgccatggctacccacaaggacgacgaagagcgattttttccatccagcggagtcttaatgtttgggaaacagggagctggaaaagacaacgtggactatagcagcgtgatgctaaccagcgaggaagaaataaagaccaccaacccagtggccacagaacagtacggcgtggtggccgataacctgcaacagcaaaacgccgctcctattgtaggggccgtcaatagtcaaggagccttacctggcatggtgtggcagaaccgggacgtgtacctgcagggtcccatctgggccaagattcctcatacggacggcaactttcatccctcgccgctgatgggaggctttggactgaagcatccgcctcctcagatcctgattaaaaacacacctgttcccgcggatcctccgaccaccttcactaaggccaagctggcttctttcatcacgcagtacagtaccggccaggtcagcgtggagatcgagtgggagctgcagaaggagaacagcaaacgctggaacccagagattcagtacacttccaactactacaaatctacaaatgtggactttgctgtcaatactgagggtacttattccgagcctcgccccattggcacccgttacctcacccgtaatctgtaattacatgttaatcaataaaccggttaattcgtttcagttgaactttggtctcctgtccttcttatcttatcggttaccatagaaactggttacttattaactgcttggtgcgcttcgcgataaaagacttacgtcatcgggttacccctagtgatgga

SEQ ID NO: 1350 - DNA, 2208 bp, Artificial Sequence
  Synthetic polynucleotide
atggctgccgatggttatcttccagattggctcgaggacactctctctgaaggaataagacagtggtggaagctcaaacctggcccaccaccaccaaagcccgcagagcggcataaggacgacagcaggggtcttgtgcttcctgggtacaagtacctcggacccttcaacggactcgacaagggagagccggtcaacgaggcagacgccgcggccctcgagcacgacaaagcctacgaccggcagctcgacagcggagacaacccgtacctcaagtacaaccacgccgacgcggagtttcaggagcgccttaaagaagatacgtcttttgggggcaacctcggacgagcagtcttccaggcgaaaaagagggttcttgaacctctgggcctggttgaggaacctgttaagaaggctccgggaaaaaagaggccggtagagcactctcctgtggagccagactcctcctcgggaaccggaaaggcgggccagcagcctgcaagaaaaagattgaattttggtcagactggagacgcagactcagtacctgacccccagcctctcggacagccaccagcagccccctctggtctgggaactaataccatggctacaggcagtggcgcaccaatggcagacaataacgagggtgccgacggagtgggtaattcctcgggaaattggcattgcgattccacatggatgggcgacagagtcatcaccaccagcacccgaacctgggccctgcccacctacaacaaccacctctacaaacaaatttccagccaatcaggagcctcgaacgacaatcactactttggctacagcaccccttgggggtattttgacttcaacagattccactgccacttttcaccacgtgactggcaaagactcatcaacaacaactggggattccgacccaagagactcaacttcaagctctttaacattcaagtcaaagaggtcacgcagaatgacggtacgacgacgattgccaataaccttaccagcacggttcaggtgtttactgactcggagtaccagctcccgtacgtcctcggctcggcgcatcaaggatgcctcccgccgttcccagcagacgtcttcatggtgccacagtatggatacctcaccctgaacaacgggagtcaggcagtaggacgctcttcattttactgcctggagtactttccttctcagatgctgcgtaccggaaacaactttaccttcagctacacttttgaggacgttcctttccacagcagctacgctcacagccagagtctggaccgtctcatgaatcctctcatcgaccagtacctgtattacttgagcagaacaaacactccaagtggaaccaccacgcagtcaaggcttcagttttctcaggccggagcgagtgacattcgggaccagtctaggaactggcttcctggaccctgttaccgccagcagcgagtatcaaagacatctgcggataacaacaacagtgaatactcgtggactggagctaccaagtaccacctcaatggcagagactctctggtgaatccgggcccggctatggcaagccacaaggacgatgaagaaaagttttttcctcagagcggggttctcatctttgggaagcaaggctcagagaaaacaaatgtggacattgaaaaggtcatgattacagacgaagaggaaatcaggacaaccaatcccgtggctacggagcagtatggttctgtatctaccaacctccagagaggcaacagacaagcagctaccgcagatgtcaacacacaaggcgttcttccaggcatggtctggcaggacagagatgtgtaccttcaggggcccatctgggcaaagattccacacacggacggacattttcacccctctcccctcatgggtggattcggacttaaacaccctcctccacagattctcatcaagaacaccccggtgcctgcgaatccttcgaccaccttcagtgcggcaaagtttgcttccttcatcacacagtactccacgggacaggtcagcgtggagatcgagtgggagctgcagaaggaaaacagcaaacgctggaatcccgaaattcagtacacttccaactacaacaagtctgttaatgtggactttactgtggacactaatggcgtgtattcagagcctcgccccattggcaccagatacctgactcgtaatctgtaa

SEQ ID NO: 1351 - protein, 735 aa, Artificial Sequence
  Synthetic polypeptide
MAADGYLPDWLEDTLSEGIRQWWKLKPGPPPPKPAERHKDDSRGLVLPGYKYLGPFNGLDKGEPVNEADAAALEHDKAYDRQLDSGDNPYLKYNHADAEFQERLKEDTSFGGNLGRAVFQAKKRVLEPLGLVEEPVKKAPGKKRPVEHSPVEPDSSSGTGKAGQQPARKRLNFGQTGDADSVPDPQPLGQPPAAPSGLGTNTMATGSGAPMADNNEGADGVGNSSGNWHCDSTWMGDRVITTSTRTWALPTYNNHLYKQISSQSGASNDNHYFGYSTPWGYFDFNRFHCHFSPRDWQRLINNNWGFRPKRLNFKLFNIQVKEVTQNDGTTTIANNLTSTVQVFTDSEYQLPYVLGSAHQGCLPPFPADVFMVPQYGYLTLNNGSQAVGRSSFYCLEYFPSQMLRTGNNFTFSYTFEDVPFHSSYAHSQSLDRLMNPLIDQYLYYLSRTNTPSGTTTQSRLQFSQAGASDIRDQSRNWLPGPCYRQQRVSKTSADNNNSEYSWTGATKYHLNGRDSLVNPGPAMASHKDDEEKFFPQSGVLIFGKQGSEKTNVDIEKVMITDEEEIRTTNPVATEQYGSVSTNLQRGNRQAATADVNTQGVLPGMVWQDRDVYLQGPIWAKIPHTDGHFHPSPLMGGFGLKHPPPQILIKNTPVPANPSTTFSAAKFASFITQYSTGQVSVEIEWELQKENSKRWNPEIQYTSNYNKSVNVDFTVDTNGVYSEPRPIGTRYLTRNL

SEQ ID NO: 1352 - DNA, 8376 bp, Artificial Sequence
  Synthetic polynucleotide
aattcccatcatcaataatataccttattttggattgaagccaatatgataatgagggggtggagtttgtgacgtggcgcggggcgtgggaacggggcgggtgacgtagtagtctctagagtcctgtattagaggtcacgtgagtgttttgcgacattttgcgacaccatgtggtcacgctgggtatttaagcccgagtgagcacgcagggtctccattttgaagcgggaggtttgaacgcgcagccaccacgccggggttttacgagattgtgattaaggtccccagcgaccttgacgggcatctgcccggcatttctgacagctttgtgaactgggtggccgagaaggaatgggagttgccgccagattctgacatggatctgaatctgattgagcaggcacccctgaccgtggccgagaagctgcagcgcgactttctgacggaatggcgccgtgtgagtaaggccccggaggcccttttctttgtgcaatttgagaagggagagagctacttccacatgcacgtgctcgtggaaaccaccggggtgaaatccatggttttgggacgtttcctgagtcagattcgcgaaaaactgattcagagaatttaccgcgggatcgagccgactttgccaaactggttcgcggtcacaaagaccagaaatggcgccggaggcgggaacaaggtggtggatgagtgctacatccccaattacttgctccccaaaacccagcctgagctccagtgggcgtggactaatatggaacagtatttaagcgcctgtttgaatctcacggagcgtaaacggttggtggcgcagcatctgacgcacgtgtcgcagacgcaggagcagaacaaagagaatcagaatcccaattctgatgcgccggtgatcagatcaaaaacttcagccaggtacatggagctggtcgggtggctcgtggacaaggggattacctcggagaagcagtggatccaggaggaccaggcctcatacatctccttcaatgcggcctccaactcgcggtcccaaatcaaggctgccttggacaatgcgggaaagattatgagcctgactaaaaccgcccccgactacctggtgggccagcagcccgtggaggacatttccagcaatcggatttataaaattttggaactaaacgggtacgatccccaatatgcggcttccgtctttctgggatgggccacgaaaaagttcggcaagaggaacaccatctggctgtttgggcctgcaactaccgggaagaccaacatcgcggaggccatagcccacactgtgcccttctacgggtgcgtaaactggaccaatgagaactttcccttcaacgactgtgtcgacaagatggtgatctggtgggaggaggggaagatgaccgccaaggtcgtggagtcggccaaagccattctcggaggaagcaaggtgcgcgtggaccagaaatgcaagtcctcggcccagatagacccgactcccgtgatcgtcacctccaacaccaacatgtgcgccgtgattgacgggaactcaacgaccttcgaacaccagcagccgttgcaagaccggatgttcaaatttgaactcacccgccgtctggatcatgactttgggaaggtcaccaagcaggaagtcaaagactttttccggtgggcaaaggatcacgtggttgaggtggagcatgaattctacgtcaaaaagggtggagccaagaaaagacccgcccccagtgacgcagatataagtgagcccaaacgggtgcgcgagtcagttgcgcagccatcgacgtcagacgcggaagcttcgatcaactacgcagacaggtaccaaaacaaatgttctcgtcacgtgggcatgaatctgatgctgtttccctgcagacaatgcgagagaatgaatcagaattcaaatatctgcttcactcacggacagaaagactgtttagagtgctttcccgtgtcagaatctcaacccgtttctgtcgtcaaaaaggcgtatcagaaactgtgctacattcatcatatcatgggaaaggtgccagacgcttgcactgcctgcgatctggtcaatgtggatttggatgactgcatctttgaacaataaatgatttaaatcaggtatggctgccgatggttatcttccagattggctcgaggacactctctctgaaggaataagacagtggtggaagctcaaacctggcccaccaccaccaaagcccgcagagcggcataaggacgacagcaggggtcttgtgcttcctgggtacaagtacctcggacccttcaacggactcgacaagggagagccggtcaacgaggcagacgccgcggccctcgagcacgacaaagcctacgaccggcagctcgacagcggagacaacccgtacctcaagtacaaccacgccgacgcggagtttcaggagcgccttaaagaagatacgtcttttgggggcaacctcggacgagcagtcttccaggcgaaaaagagggttcttgaacctctgggcctggttgaggaacctgttaagacggctccgggaaaaaagaggccggtagagcactctcctgtggagccagactcctcctcgggaaccggaaaggcgggccagcagcctgcaagaaaaagattgaattttggtcagactggagacgcagactcagtacctgacccccagcctctcggacagccaccagcagccccctctggtctgggaactaatacgatggctacaggcagtggcgcaccaatggcagacaataacgagggcgccgacggagtgggtaattcctcgggaaattggcattgcgattccacatggatgggcgacagagtcatcaccaccagcacccgaacctgggccctgcccacctacaacaaccacctctacaaacaaatttccagccaatcaggagcctcgaacgacaatcactactttggctacagcaccccttgggggtattttgacttcaacagattccactgccacttttcaccacgtgactggcaaagactcatcaacaacaactggggattccgacccaagagactcaacttcaagctctttaacattcaagtcaaagaggtcacgcagaatgacggtacgacgacgattgccaataaccttaccagcacggttcaggtgtttactgactcggagtaccagctcccgtacgtcctcggctcggcgcatcaaggatgcctcccgccgttcccagcagacgtcttcatggtgccacagtatggatacctcaccctgaacaacgggagtcaggcagtaggacgctcttcattttactgcctggagtactttccttctcagatgctgcgtaccggaaacaactttaccttcagctacacttttgaggacgttcctttccacagcagctacgctcacagccagagtctggaccgtctcatgaatcctctcatcgaccagtacctgtattacttgagcagaacaaacactccaagtggaaccaccacgcagtcaaggcttcagttttctcaggccggagcgagtgacattcgggaccagtctaggaactggcttcctggaccctgttaccgccagcagcgagtatcaaagacatctgcggataacaacaacagtgaatactcgtggactggagctaccaagtaccacctcaatggcagagactctctggtgaatccgggcccggccatggcaagccacaaggacgatgaagaaaagttttttcctcagagcggggttctcatctttgggaagcaaggctcagagaaaacaaatgtggacattgaaaaggtcatgattacagacgaagaggaaatcaggacaaccaatcccgtggctacggagcagtatggttctgtatctaccaacctccagagaggcaacagacaagcagctaccgcagatgtcaacacacaaggcgttcttccaggcatggtctggcaggacagagatgtgtaccttcaggggcccatctgggcaaagattccacacacggacggacattttcacccctctcccctcatgggtggattcggacttaaacaccctcctccacagattctcatcaagaacaccccggtacctgcgaatccttcgaccaccttcagtgcggcaaagtttgcttccttcatcacacagtactccacgggacaggtcagcgtggagatcgagtgggagctgcagaaggaaaacagcaaacgctggaatcccgaaattcagtacacttccaactacaacaagtctgttaatgtggactttactgtggacactaatggcgtgtattcagagcctcgccccattggcaccagatacctgactcgtaatctgtaattgcttgttaatcaataaaccgtttaattcgtttcagttgaactttggtctctgcgtatttctttcttatctagtttccatgctctagagtcctgtattagaggtcacgtgagtgttttgcgacattttgcgacaccatgtggtcacgctgggtatttaagcccgagtgagcacgcagggtctccattttgaagcgggaggtttgaacgcgcagccaccacggcggggttttacgagattgtgattaaggtccccagcgaccttgacgggcatctgcccggcatttctgacagctttgtgaactgggtggccgagaaggaatgggagttgccgccagattctgacatggatctgaatctgattgagcaggcacccctgaccgtggccgagaagctgcatcgctggcgtaatagcgaagaggcccgcaccgatcgcccttcccaacagttgcgcagcctgaatggcgaatggaattccagacgattgagcgtcaaaatgtaggtatttccatgagcgtttttcctgttgcaatggctggcggtaatattgttctggatattaccagcaaggccgatagtttgagttcttctactcaggcaagtgatgttattactaatcaaagaagtattgcgacaacggttaatttgcgtgatggacagactcttttactcggtggcctcactgattataaaaacacttctcaggattctggcgtaccgttcctgtctaaaatccctttaatcggcctcctgtttagctcccgctctgattctaacgaggaaagcacgttatacgtgctcgtcaaagcaaccatagtacgcgccctgtagcggcgcattaagcgcggcgggtgtggtggttacgcgcagcgtgaccgctacacttgccagcgccctagcgcccgctcctttcgctttcttcccttcctttctcgccacgttcgccggctttccccgtcaagctctaaatcgggggctccctttagggttccgatttagtgctttacggcacctcgaccccaaaaaacttgattagggtgatggttcacgtagtgggccatcgccctgatagacggtttttcgccctttgacgttggagtccacgttctttaatagtggactcttgttccaaactggaacaacactcaaccctatctcggtctattcttttgatttataagggattttgccgatttcggcctattggttaaaaaatgagctgatttaacaaaaatttaacgcgaattttaacaaaatattaacgtttacaatttaaatatttgcttatacaatcttcctgtttttggggcttttctgattatcaaccggggtacatatgattgacatgctagttttacgattaccgttcatcgattctcttgtttgctccagactctcaggcaatgacctgatagcctttgtagagacctctcaaaaatagctaccctctccggcatgaatttatcagctagaacggttgaatatcatattgatggtgatttgactgtctccggcctttctcacccgtttgaatctttacctacacattactcaggcattgcatttaaaatatatgagggttctaaaaatttttatccttgcgttgaaataaaggcttctcccgcaaaagtattacagggtcataatgtttttggtacaaccgatttagctttatgctctgaggctttattgcttaattttgctaattctttgccttgcctgtatgatttattggatgttggaattcctgatgcggtattttctccttacgcatctgtgcggtatttcacaccgcatatggtgcactctcagtacaatctgctctgatgccgcatagttaagccagccccgacacccgccaacacccgctgacgcgccctgacgggcttgtctgctcccggcatccgcttacagacaagctgtgaccgtctccgggagctgcatgtgtcagaggttttcaccgtcatcaccgaaacgcgcgagacgaaagggcctcgtgatacgcctatttttataggttaatgtcatgataataatggtttcttagacgtcaggtggcacttttcggggaaatgtgcgcggaacccctatttgtttatttttctaaatacattcaaatatgtatccgctcatgagacaataaccctgataaatgcttcaataatattgaaaaaggaagagtatgagtattcaacatttccgtgtcgcccttattcccttttttgcggcattttgccttcctgtttttgctcacccagaaacgctggtgaaagtaaaagatgctgaagatcagttgggtgcacgagtgggttacatcgaactggatctcaacagcggtaagatccttgagagttttcgccccgaagaacgttttccaatgatgagcacttttaaagttctgctatgtggcgcggtattatcccgtattgacgccgggcaagagcaactcggtcgccgcatacactattctcagaatgacttggttgagtactcaccagtcacagaaaagcatcttacggatggcatgacagtaagagaattatgcagtgctgccataaccatgagtgataacactgcggccaacttacttctgacaacgatcggaggaccgaaggagctaaccgcttttttgcacaacatgggggatcatgtaactcgccttgatcgttgggaaccggagctgaatgaagccataccaaacgacgagcgtgacaccacgatgcctgtagcaatggcaacaacgttgcgcaaactattaactggcgaactacttactctagcttcccggcaacaattaatagactggatggaggcggataaagttgcaggaccacttctgcgctcggcccttccggctggctggtttattgctgataaatctggagccggtgagcgtgggtctcgcggtatcattgcagcactggggccagatggtaagccctcccgtatcgtagttatctacacgacggggagtcaggcaactatggatgaacgaaatagacagatcgctgagataggtgcctcactgattaagcattggtaactgtcagaccaagtttactcatatatactttagattgatttaaaacttcatttttaatttaaaaggatctaggtgaagatcctttttgataatctcatgaccaaaatcccttaacgtgagttttcgttccactgagcgtcagaccccgtagaaaagatcaaaggatcttcttgagatcctttttttctgcgcgtaatctgctgcttgcaaacaaaaaaaccaccgctaccagcggtggtttgtttgccggatcaagagctaccaactctttttccgaaggtaactggcttcagcagagcgcagataccaaatactgtccttctagtgtagccgtagttaggccaccacttcaagaactctgtagcaccgcctacatacctcgctctgctaatcctgttaccagtggctgctgccagtggcgataagtcgtgtcttaccgggttggactcaagacgatagttaccggataaggcgcagcggtcgggctgaacggggggttcgtgcacacagcccagcttggagcgaacgacctacaccgaactgagatacctacagcgtgagctatgagaaagcgccacgcttcccgaagggagaaaggcggacaggtatccggtaagcggcagggtcggaacaggagagcgcacgagggagcttccagggggaaacgcctggtatctttatagtcctgtcgggtttcgccacctctgacttgagcgtcgatttttgtgatgctcgtcaggggggcggagcctatggaaaaacgccagcaacgcggcctttttacggttcctggccttttgctggccttttgctcacatgttctttcctgcgttatcccctgattctgtggataaccgtattaccgcctttgagtgagctgataccgctcgccgcagccgaacgaccgagcgcagcgagtcagtgagcgaggaagcggaagagcgcccaatacgcaaaccgcctctccccgcgcgttggccgattcattaatgca

SEQ ID NO: 1353 - DNA, 1085 bp, Artificial Sequence
  Synthetic polynucleotide
  modified_base (611)..(611): a, c, t, or g
  misc_feature (611)..(611): n is a, c, g, or t
  modified_base (640)..(640): a, c, t, or g
  misc_feature (640)..(640): n is a, c, g, or t
  modified_base (1039)..(1039): a, c, t, or g
  misc_feature (1039)..(1039): n is a, c, g, or t
tgcccacttacaacaaccatctctacaagcaaatctccagcvvmdcaggagctascaacgacaaccactactttggctacagcaccccttgggggtattttgactttaacagattccactgccacttctcaccacgtgactggcagcgactcattaacaacaactggggattccggcccaagaaactcagcttcaagctcttcaacatccaagttagaggggtcacgcagaacgatggcacgacgactattgccaataaccttaccagcacggttcaagtgtttacggactcggagtatcagctcccgtacgtgctcgggtcggcgcaccaaggctgtctcccgccgtttccagcggacgtcttcatggtccctcagtatggatacctcaccctgaacaacggaagtcaagcggtgggacgctcatccttttactgcctggagtacttcccttcgcagatgctaaggactggaaataacttccaattcagctataccttcgaggatgtaccttttcacagcagctacgctcacagccagagtttggatcgcttgatgaatcctcttattgatcagtatctgtactacctgaacagaacgcaargcamcvcnrgcggaacarccrvcmhsmrsvvsctgvngtttagccaggctgggcctcagtctatgtctttgcaggccagaaattggctacctgggccctgctaccggcaacagagactttcaamarycbmcrvcsrsaacaacaacagtrastttccttggmcagcggccagcamatatcatctcaatggccgcgactcgctggtgaatccaggaccagctatggccagtcacrrggacgatrmsgrsaratttttccctatgcacggcaatctaatatttggcaaasaarrcrscrvsrvarvcratrycgmsdwcgrsvrsgtaatgattacggatgaagaagagattcgtaccaccaatcctgtggcaacagagcagtatggaactgtggcaaataacttgcagrvsvvsmrsrvcvvscccacgdhtvvsrnsgtcvmscatcagggggccttacctggcatggtgtggcaagatcgt

SEQ ID NO: 1354 - protein, 620 aa, Artificial Sequence
  Synthetic polypeptide
  MOD_RES (263)..(264): Any naturally occurring amino acid
  MOD_RES (267)..(267): Any naturally occurring amino acid
  MOD_RES (450)..(453): Any naturally occurring amino acid
  MOD_RES (456)..(460): Any naturally occurring amino acid
  MOD_RES (462)..(462): Any naturally occurring amino acid
  MOD_RES (491)..(495): Any naturally occurring amino acid
  MOD_RES (500)..(500): Any naturally occurring amino acid
  MOD_RES (504)..(504): Any naturally occurring amino acid
  MOD_RES (508)..(508): Any naturally occurring amino acid
  MOD_RES (528)..(528): Any naturally occurring amino acid
  MOD_RES (531)..(533): Any naturally occurring amino acid
  MOD_RES (546)..(557): Any naturally occurring amino acid
  MOD_RES (586)..(590): Any naturally occurring amino acid
  MOD_RES (593)..(595): Any naturally occurring amino acid
  MOD_RES (597)..(597): Any naturally occurring amino acid
MAADGYLPDWLEDNLSEGIREWWALKPGVPQPKANQQHQDNRRGLVLPGYKYLGPGNGLDKGEPVNEADAAALEHDKAYDQQLKAGDNPYLKYNHADAEFQERLQEDTSFGGNLGRAVFQAKKRILEPLGLVEEAAKTAPGKKGAVDQSPQEPDSSSGVGKSGKQPARKRLNFGQTGDSESVPDPQPLGEPPAAPTSLGSNTMASGGGAPMADNNEGADGVGNSSGNWHCDSQWLGDRVITTSTRTWALPTYNNHLYKQISSXXGAXNDNHYFGYSTPWGYFDFNRFHCHFSPRDWQRLINNNWGFRPKKLSFKLFNIQVRGVTQNDGTTTIANNLTSTVQVFTDSEYQLPYVLGSAHQGCLPPFPADVFMVPQYGYLTLNNGSQAVGRSSFYCLEYFPSQMLRTGNNFQFSYTFEDVPFHSSYAHSQSLDRLMNPLIDQYLYYLNRTQXXXXGTXXXXXLXFSQAGPQSMSLQARNWLPGPCYRQQRLSXXXXXNNNSXFPWXAASXYHLNGRDSLVNPGPAMASHXDDXXXFFPMHGNLIFGKXXXXXXXXXXXXVMITDEEEIRTTNPVATEQYGTVANNLQXXXXXPTXXXVXHQGALPGMVWQDRDVYLQGPIWA

SEQ ID NO: 1355 - DNA, 1491 bp, Artificial Sequence
  Synthetic polynucleotide
accaccagcaccagaacctgggccctgcccacttacaacaaccatctctacaagcaaatctccagccaatcaggagcttcaaacgacaaccactactttggctacagcaccccttgggggtattttgactttaacagattccactgccacttctcaccacgtgactggcagcgactcattaacaacaactggggattccggcccaagaaactcagcttcaagctcttcaacatccaagttagaggggtcacgcagaacgatggcacgacgactattgccaataaccttaccagcacggttcaagtgtttacggactcggagtatcagctcccgtacgtgctcgggtcggcgcaccaaggctgtctcccgccgtttccagcggacgtcttcatggtccctcagtatggatacctcaccctgaacaacggaagtcaagcggtgggacgctcatccttttactgcctggagtacttcccttcgcagatgctaaggactggaaataacttccaattcagctataccttcgaggatgtaccttttcacagcagctacgctcacagccagagtttggatcgcttgatgaatcctcttattgatcagtatctgtactacctgaacagaacgcaaggaacaacctctggaacaaccaaccaatcacggctgctttttagccaggctgggcctcagtctatgtctttgcaggccagaaattggctacctgggccctgctaccggcaacagagactttcaaagactgctaacgacaacaacaacagtaactttccttggacagcggccagcaaatatcatctcaatggccgcgactcgctggtgaatccaggaccagctatggccagtcacaaggacgatgaagaaaaatttttccctatgcacggcaatctaatatttggcaaagaagggacaacggcaagtaacgcagaattagataatgtaatgattacggatgaagaagagattcgtaccaccaatcctgtggcaacagagcagtatggaactgtggcaaataacttgcagagctcaaatacagctcccacgactggaactgtcaatcatcagggggccttacctggcatggtgtggcaagatcgtgacgtctaccttcaaggacctatctgggcaaagattcctcacacggatggacactttcatccttctcctctgatgggaggctttggactgaaacatccgcctcctcaaatcatgatcaaaaatactccggtaccggcaaatcctccgacgactttcagcccggccaagtttgcttcatttatcactcagtactccactggacaggtcagcgtggaaattgagtgggagctacagaaagaaaacagcaaacgttggaatccagagattcagtacacttccaactacaacaagtctgttaatgtggactttactgtagacactaatggtgtttatagtgaacctcgccctattggaacccggtatctcacacgaaacttgtga

SEQ ID NO: 1356 - protein, 482 aa, Artificial Sequence
  Synthetic polypeptide
TTSTRTWALPTYNNHLYKQISSQSGASNDNHYFGYSTPWYFDFNRFHCHFSPRDWQRLNNNWGFRPKKLSFKLFNIQRGVTQNDGTTTIANNLTSTQVFTDSEYQLPYVLGSAHQCLPPFPADVFMVPQYGYLTNNGSQAVGRSSFYCLEYFPQMLRTGNNFQFSYTFEDVPHSSYAHSQSLDRLMNPLIDYLYYLNRTQGTTSGTTNQSLLFSQAGPQSMSLQARNWLGPCYRQQRLSKTANDNNNSFPWTAASKYHLNGRDSLVNGPAMASHKDDEEKFFPMHGLIFGKEGTTASNAELDNVMITDEEEIRTTNPVATEQYGTVANNLQSSNTAPTTGTVNHQGALPGMVWQDRDVYLQGPIWAKIPHTDGHFHPSPLMGGFGLKHPPPQIMIKNTPVPANPPTTFSPAKFASFITQYSTGQVSVEIEWELQKENSKRWNPEIQYTSNYNKSVNVDFTVDTNGVYSEPRPIGTRYLTRNL

SEQ ID NO: 1357 - DNA, 1140 bp, Artificial Sequence
  Synthetic polynucleotide
  modified_base (636)..(636): a, c, t, or g
  misc_feature (636)..(636): n is a, c, g, or t
  modified_base (665)..(665): a, c, t, or g
  misc_feature (665)..(665): n is a, c, g, or t
  modified_base (1064)..(1064): a, c, t, or g
  misc_feature (1064)..(1064): n is a, c, g, or t
accaccagcaccagaacctgggccctgcccacttacaacaaccatctctacaagcaaatctccagcvvmdcaggagctascaacgacaaccactactttggctacagcaccccttgggggtattttgactttaacagattccactgccacttctcaccacgtgactggcagcgactcattaacaacaactggggattccggcccaagaaactcagcttcaagctcttcaacatccaagttagaggggtcacgcagaacgatggcacgacgactattgccaataaccttaccagcacggttcaagtgtttacggactcggagtatcagctcccgtacgtgctcgggtcggcgcaccaaggctgtctcccgccgtttccagcggacgtcttcatggtccctcagtatggatacctcaccctgaacaacggaagtcaagcggtgggacgctcatccttttactgcctggagtacttcccttcgcagatgctaaggactggaaataacttccaattcagctataccttcgaggatgtaccttttcacagcagctacgctcacagccagagtttggatcgcttgatgaatcctcttattgatcagtatctgtactacctgaacagaacgcaargcamcvcnrgcggaacarccrvcmhsmrsvvsctgvngtttagccaggctgggcctcagtctatgtctttgcaggccagaaattggctacctgggccctgctaccggcaacagagactttcaamarycbmcrvcsrsaacaacaacagtrastttccttggmcagcggccagcamatatcatctcaatggccgcgactcgctggtgaatccaggaccagctatggccagtcacrrggacgatrmsgrsaratttttccctatgcacggcaatctaatatttggcaaasaarrcrscrvsrvarvcratrycgmsdwcgrsvrsgtaatgattacggatgaagaagagattcgtaccaccaatcctgtggcaacagagcagtatggaactgtggcaaataacttgcagrvsvvsmrsrvcvvscccacgdhtvvsrnsgtcvmscatcagggggccttacctggcatggtgtggcaagatcgtgacgtctaccttcaaggacctatctgggca

SEQ ID NO: 1358 - protein, 620 aa, Artificial Sequence; identical to SEQ ID NO: 1354
  Synthetic polypeptide
  MOD_RES (263)..(264): Any naturally occurring amino acid
  MOD_RES (267)..(267): Any naturally occurring amino acid
  MOD_RES (450)..(453): Any naturally occurring amino acid
  MOD_RES (456)..(460): Any naturally occurring amino acid
  MOD_RES (462)..(462): Any naturally occurring amino acid
  MOD_RES (491)..(495): Any naturally occurring amino acid
  MOD_RES (500)..(500): Any naturally occurring amino acid
  MOD_RES (504)..(504): Any naturally occurring amino acid
  MOD_RES (508)..(508): Any naturally occurring amino acid
  MOD_RES (528)..(528): Any naturally occurring amino acid
  MOD_RES (531)..(533): Any naturally occurring amino acid
  MOD_RES (546)..(557): Any naturally occurring amino acid
  MOD_RES (586)..(590): Any naturally occurring amino acid
  MOD_RES (593)..(595): Any naturally occurring amino acid
  MOD_RES (597)..(597): Any naturally occurring amino acid

SEQ ID NO: 1359 - protein, 738 aa, Artificial Sequence; identical to SEQ ID NO: 12
  Synthetic polypeptide

SEQ ID NO: 1360 - DNA, 2258 bp, Artificial Sequence
  Synthetic polynucleotide
tcgaggacaacctctctgagggcattcgcgagtggtgggacttgaaacctggagccccgaaacccaaagccaaccagcaaaagcaggacgacggccggggtctggtgcttcctggctacaagtacctcggacccttcaacggactcgacaagggggagcccgtcaacgcggcggacgcagcggccctcgagcacgacaaggcctacgaccagcagctcaaagcgggtgacaatccgtacctgcggtataaccacgccgacgccgagtttcaggagcgtctgcaagaagatacgtcttttgggggcaacctcgggcgagcagtcttccaggccaagaagcgggttctcgaacctctcggtctggttgaggaaggcgctaagacggctcctggaaagaagagaccggtagagccatcaccccagcgttctccagactcctctacgggcatcggcaagaaaggccagcagcccgcgaaaaagagactcaactttgggcagactggcgactcagagtcagtgcccgaccctcaaccaatcggagaaccccccgcaggcccctctggtctgggatctggtacaatggctgcaggcggtggcgctccaatggcagacaataacgaaggcgccgacggagtgggtagttcctcaggaaattggcattgcgattccacatggctgggcgacagagtcatcaccaccagcacccgaacctgggccctccccacctacaacaaccacctctacaagcaaatctccaacgggacttcgggaggaagcaccaacgacaacacctacttcggctacagcaccccctgggggtattttgactttaacagattccactgccacttctcaccacgtgactggcagcgactcatcaacaacaactggggattccggcccaagagactcaacttcaagctcttcaacatccaggtcaaggaggtcacgcagaatgaaggcaccaagaccatcgccaataaccttaccagcacgattcaggtctttacggactcggaataccagctcccgtacgtcctcggctctgcgcaccagggctgcctgcctccgttcccggcggacgtcttcatgattcctcagtacgggtacctgactctgaacaatggcagtcaggccgtgggccgttcctccttctactgcctggagtactttccttctcaaatgctgagaacgggcaacaactttgagttcagctaccagtttgaggacgtgccttttcacagcagctacgcgcacagccaaagcctggaccggctgatgaaccccctcatcgaccagtacctgtactacctgtctcggactcagtccacgggaggtaccgcaggaactcagcagttgctattttctcaggccgggcctaataacatgtcggctcaggccaaaaactggctacccgggccctgctaccggcagcaacgcgtctccacgacactgtcgcaaaataacaacagcaactttgcctggaccggtgccaccaagtatcatctgaatggcagagactctctggtaaatcccggtgtcgctatggcaacccacaaggacgacgaagagcgattttttccgtccagcggagtcttaatgtttgggaaacagggagctggaaaagacaacgtggactatagcagcgttatgctaaccagtgaggaagaaattaaaaccaccaacccagtggccacagaacagtacggcgtggtggccgataacctgcaacagcaaaacgccgctcctattgtaggggccgtcaacagtcaaggagccttacctggcatggtctggcagaaccgggacgtgtacctgcagggtcctatctgggccaagattcctcacacggacggaaactttcatccctcgccgctgatgggaggctttggactgaaacacccgcctcctcagatcctgattaagaatacacctgttcccgcggatcctccaactaccttcagtcaagctaagctggcgtcgttcatcacgcagtacagcaccggacaggtcagcgtggaaattgaatgggagctgcagaaagaaaacagcaaacgctggaacccagagattcaatacacttccaactactacaaatctacaaatgtggactttgctgttaacacagatggcacttattctgagcctcgccccatcggcacccgttacctcacccgtaatctgtaattgcttgttaatcaataaaccggttgattcgtttcagttgaactttggtctctgcgaagggcgaattcgttt

SEQ ID NO: 1361 - DNA, 2208 bp, Artificial Sequence
  Synthetic polynucleotide
atggctgccgatggttatcttccagattggctcgaggacactctctctgaaggaataagacagtggtggaagctcaaacctggcccaccaccaccaaagcccgcagagcggcataaggacgacagcaggggtcttgtgcttcctgggtacaagtacctcggacccttcaacggactcgacaagggagagccggtcaacgaggcagacgccgcggccctcgagcacgacaaagcctacgaccggcagctcgacagcggagacaacccgtacctcaagtacaaccacgccgacgcggagtttcaggagcgccttaaagaagatacgtcttttgggggcaacctcggacgagcagtcttccaggcgaaaaagagggttcttgaacctctgggcctggttgaggaacctgttaagacggctccgggaaaaaagaggccggtagagcactctcctgtggagccagactcctcctcgggaaccggaaaggcgggccagcagcctgcaagaaaaagattgaattttggtcagactggagacgcagactcagtacctgacccccagcctctcggacagccaccagcagccccctctggtctgggaactaatacgatggctacaggcagtggcgcaccaatggcagacaataacgagggcgccgacggagtgggtaattcctcgggaaattggcattgcgattccacatggatgggcgacagagtcatcaccaccagcacccgaacctgggccctgcccacctacaacaaccacctctacaaacaaatttccagccaatcaggagcctcgaacgacaatcactactttggctacagcaccccttgggggtattttgacttcaacagattccactgccacttttcaccacgtgactggcaaagactcatcaacaacaactggggattccgacccaagagactcaacttcaagctctttaacattcaagtcaaagaggtcacgcagaatgacggtacgacgacgattgccaataaccttaccagcacggttcaggtgtttactgactcggagtaccagctcccgtacgtcctcggctcggcgcatcaaggatgcctcccgccgttcccagcagacgtcttcatggtgccacagtatggatacctcaccctgaacaacgggagtcaggcagtaggacgctcttcattttactgcctggagtactttccttctcagatgctgcgtaccggaaacaactttaccttcagctacacttttgaggacgttcctttccacagcagctacgctcacagccagagtctggaccgtctcatgaatcctctcatcgaccagtacctgtatttcttaagcagaacaaacactccaagtggaaccaccacgcagtcaaggcttcagttttctcaggccggagcgagtgacattcgggaccagtctaggaactggcttcctggaccctgttaccgccagcagcgagtatcaaagacatctgcggataacaacaacagtgaattctcgtggaccggtgctaccaagtaccacctcaatggcagagactctctggtgaatccgggcccggccatggcaagccacaaggacgatgaagaaaagttttttcctcagagcggggttctcatctttgggaagcaaggctcagagaaaacaaatgtggacattgaaaaggtcatgattacagacgaagaggaaatcaggacaaccaatcccgtggctacggagcagtatggttctgtatctaccaacctccagagaggcaacagacaagcagctaccgcagatgtcaacacacaaggcgttcttccaggcatggtctggcaggacagagatgtgtaccttcaggggcccatctgggcaaagattccacacacggacggacattttcacccctctcccctcatgggtggattcggacttaaacaccctcctccacagattctcatcaagaacaccccggtacctgcgaatccttcgaccaccttcagtgcggcaaagtttgcttccttcatcacacagtactccacgggacaggtcagcgtggagatcgagtgggagctgcagaaggaaaacagcaaacgctggaatcccgaaattcagtacacttccaactacaacaagtctgttaatgtggactttactgtggacactaatggcgtgtattcagagcctcgccccattggtaccagattcctgactcgtaatctgtaa

SEQ ID NO: 1362 - protein, 737 aa, Artificial Sequence
  Synthetic polypeptide
MAADGYLPDWLEDNLSEGIREWWDLKPGAPKPKANQQKQDNGRGLVLPGYKYLGPFNGLDKGEPVNAADAAALEHDKAYDQQLQAGDNPYLRYNHADAEFQERLQEDTSFGGNLGRAVFQAKKRVLEPLGLVESPVKTAPGKKRPVEPSPQRSPDSSTGIGKKGQQPAKKRLNFGQTGDSESVPDPQPIGEPPAAPSGVGPNTMAAGGGAPMADNNEGADGVGSSSGNWHCDSTWLGDRVITTSTRTWALPTYNNHLYKQISNGTSGGSTNDNTYFGYSTPWGYFDFNRFHCHFSPRDWQRLINNNWGFRPKRLNFKLFNIQVKEVTQNEGTKTIANNLTSTIQVFTDSEYQLPYVLGSAHQGCLPPFPADVFMIPQYGYLTLNNGSQAVGRSSFYCLEYFPSQMLRTGNNFEFSYNFEDVPFHSSYAHSQSLDRLMNPLIDQYLYYLSRTQSTGGTAGTQQLLFSQAGPNNMSAQAKNWLPGPCYRQQRVSTTLSQNNNSNFAWTGATKYHLNGRDSLVNPGVAMATHKDDEERFFPSSGVLMFGKQGAGKDNVDYSSVMLTSEEEIKTTNPVATEQYGWADNLQQQNAAPIVGAVNSQGALPGMVWQNRDVYLQGPIWAKIPHTDGNFHPSPLMGGFGLKHPPPQILIKNTPVPADPPTTFNQAKLASFITQYSTGQVSVEIEWELQKENSKRWNPEIQYTSNYYKSTNVDFAVNTEGTYSEPRPIGTRYLTRNL

SEQ ID NO: 1363 - DNA, 2211 bp, Artificial Sequence
  Synthetic polynucleotide
atggctgccgatggttatcttccagattggctcgaggacactctctctgaaggaataagacagtggtggaagctcaaacctggcccaccaccaccaaagcccgcagagcggcataaggacgacagcaggggtcttgtgcttcctgggtacaagtacctcggacccttcaacggactcgacaagggagagccggtcaacgaggcagacgccgcggccctcgagcacgacaaagcctacgaccggcagctcgacagcggagacaacccgtacctcaagtacaaccacgccgacgcggagtttcaggagcgccttaaagaagatacgtcttttgggggcaacctcggacgagcagtcttccaggcgaaaaagagggttcttgaacctctgggcctggttgaggaacctgttaagacggctccgggaaaaaagaggccggtagagcactctcctgtggagccagactcctcctcgggaaccggaaaggcgggccagcagcctgcaagaaaaagattgaattttggtcagactggagacgcagactcagtacctgacccccagcctctcggacagccaccagcagccccctctggtctgggaactaatacgatggctacaggcagtggcgcaccaatggcagacaataacgagggcgccgacggagtgggtaattcctcgggaaattggcattgcgattccacatggatgggcgacagagtcatcaccaccagcacccgaacctgggccctgcccacctacaacaaccacctctacaaacaaatttccagcgcttcaacgggagcctcgaacgacaatcactactttggctacagcaccccttgggggtattttgacttcaacagattccactgccacttttcaccacgtgactggcaaagactcatcaacaacaactggggattccgacccaagagactcaacttcaagctctttaacattcaagtcaaagaggtcacgcagaatgacggtacgacgacgattgccaataaccttaccagcacggttcaggtgtttactgactcggagtaccagctcccgtacgtcctcggctcggcgcatcaaggatgcctcccgccgttcccagcagacgtcttcatggtgccacagtatggatacctcaccctgaacaacgggagtcaggcagtaggacgctcttcattttactgcctggagtactttccttctcagatgctgcgtaccggaaacaactttaccttcagctacacttttgaggacgttcctttccacagcagctacgctcacagccagagtctggaccgtctcatgaatcctctcatcgaccagtacctgtattacttgagcagaacaaacactccaagtggaaccaccacgcagtcaaggcttcagttttctcaggccggagcgagtgacattcgggaccagtctaggaactggcttcctggaccctgttaccgccagcagcgagtatcaaagacatctgcggataacaacaacagtgaatactcgtggactggagctaccaagtaccacctcaatggcagagactctctggtgaatccgggcccggccatggcaagccacaaggacgatgaagaaaagttttttcctcagagcggggttctcatctttgggaagcaaggctcagagaaaacaaatgtggacattgaaaaggtcatgattacagacgaagaggaaatcaggacaaccaatcccgtggctacggagcagtatggttctgtatctaccaacctccagagaggcaacagacaagcagctaccgcagatgtcaacacacaaggcgttcttccaggcatggtctggcaggacagagatgtgtaccttcaggggcccatctgggcaaagattccacacacggacggacattttcacccctctcccctcatgggtggattcggacttaaacaccctcctccacagattctcatcaagaacaccccggtacctgcgaatccttcgaccaccttcagtgcggcaaagtttgcttccttcatcacacagtactccacgggacaggtcagcgtggagatcgagtgggagctgcagaaggaaaacagcaaacgctggaatcccgaaattcagtacacttccaactacgccaagtctgtcaatgtggactttactgtggacaataatggcgtgtattcagagcctcgccccattggcaccagatacctgactcgtaatctgtaa

SEQ ID NO: 1364 - DNA, 2208 bp, Artificial Sequence
  Synthetic polynucleotide
atggctgccgatggttatcttccagattggctcgaggacaacctctctgagggcattcgcgagtggtgggacttgaaacctggagccccgaagcccaaagccaaccagcaaaagcaggacgacggccggggtctggtgcttcctggctacaagtacctcggacccttcaacggactcgacaagggggagcccgtcaacgcggcggacgcagcggccctcgagcacgacaaggcctacgaccagcagctcaaagcgggtgacaatccgtacctgcggtataaccacgccgacgccgagtttcaggagcgtctgcaagaagatacgtcttttgggggcaacctcgggcgagcagtcttccaggccaagaagcgggttctcgaacctctcggtctggttgaggaaggcgctaagacggctcctggaaagaaacgtccggtagagcagtcgccacaagagccagactcctcctcgggcatcggcaagacaggccagcagcccgctaaaaagagactcaattttggtcagactggcgactcagagtcagtccccgatccacaacctctcggagaacctccagcaacccccgctgctgtgggacctactacaatggcttcaggcggtggcgcaccaatggcagacaataacgaaggcgccgacggagtgggtaatgcctcaggaaattggcattgcgattccacatggctgggcgacagagtcatcaccaccagcacccgcacctgggccttgcccacctacaataaccacctctacaagcaaatctccagtgcttcaggggccagcaacgacaaccactacttcggctacagcaccccctgggggtattttgatttcaacagattccactgccacttttcaccacgtgactggcagcgactcatcaacaacaattggggattccggcccaagagactcaacttcaaactcttcaacatccaagtcaaggaggtcacgacgaatgatggcgtcacaaccatcgctaataaccttaccagcacggttcaagtcttctcggactcggagtaccagcttccgtacgtcctcggctctgcgcaccagggctgcctccctccgttcccggcggacgtgttcatgattccgcaatacggctacctgacgctcaacaatggcagccaagccgtgggacgttcatccttttactgcctggaatatttcccttctcagatgctgagaacgggcaacaactttaccttcagctacacctttgaggaagtgcctttccacagcagctacgcgcacagccagagcctggaccggctgatgaatcctctcatcgaccaatacctgtattacctgaacagaactcaaaatcagtccggaagtgcccaaaacaaggacttgctgtttagccgtgggtctccagctggcatgtctgttcagcccaaaaactggctacctggaccctgttatcggcagcagcgcgtttctaaaacaaaaacagacaacaacaacagcaattttacctggactggtgcttcaaaatataacctcaatgggcgtgaatccatcatcaaccctggcactgctatggcctcacacaaagacgacgaagacaagttctttcccatgagcggtgtcatgatttttggaaaagagagcgccggagcttcaaacactgcattggacaatgtcatgattacagacgaagaggaaattaaagccactaaccctgtggccaccgaaagatttgggaccgtggcagtcaatttccagagcagcagcacagaccctgcgaccggagatgtgcatgctatgggagcattacctggcatggtgtggcaagatagagacgtgtacctgcagggtcccatttgggccaaaattcctcacacagatggacactttcacccgtctcctcttatgggcggctttggactcaagaacccgcctcctcagatcctcatcaaaaacacgcctgttcctgcgaatcctccggcggagttttcagctacaaagtttgcttcattcatcacccaatactccacaggacaagtgagtgtggaaattgaatgggagctgcagaaagaaaacagcaagcgctggaatcccgaagtgcagtacacatccaattatgcaaaatctgccaacgttgattttactgtggacaacaatggactttatactgagcctcgccccattggcacccgttaccttacccgtcccctgtaa

SEQ ID NO: 1365 - DNA, 2205 bp, Artificial Sequence
  Synthetic polynucleotide
atggctgccgatggttatcttccagattggctcgaggacaacctctdgagggcattcgcgagtggtgggacttgaaacctggagccccgaaacccaaagccaaccagcaaaagcaggacgacggccggggtdggtgcttcctggctacaagtacctcggacccttcaacggactcgacaagggggagcccgtcaacgcggcggatgcagcggccctcgagcacgacaaggcctacgaccagcagctcaaagcgggtgacaatccgtacctgcggtataaccacgccgacgccgagtttcaggagcgtctgcaagaagatacgtcttttgggggcaacctcgggcgagcagtcttccaggccaagaagagggttctcgaaccttttggtdggttgaggaaggtgctaagacggctcctggaaagaaacgtccggtagagcagtcgccacaagagccagactcctcctcgggcattggcaagacaggccagcagcccgctaaaaagagactcaattttggtcagactggcgactcagagtcagtccccgacccacaacctctcggagaacctccagcaacccccgctgctgtgggacctactacaatggcttcaggcggtggcgcaccaatggcagacaataacgaaggcgccgacggagtgggtaatgcctcaggaaattggcattgcgattccacatggctgggcgacagagtcatcaccaccagcacccgaacatgggccttgcccacctataacaaccacctctacaagcaaatctccagtgcttcaggggccagcaacgacaaccactacttcggctacagcaccccctgggggtattttgatttcaacagattccactgccatttctcaccacgtgactggcagcgactcatcaacaacaattggggattccggcccaagagactcaacttcaagctcttcaacatccaagtcaaggaggtcacgacgaatgatggcgtcacgaccatcgctaataaccttaccagcacggttcaagtcttctcggactcggagtaccagttgccgtacgtcctcggctctgcgcaccagggctgcctccctccgttcccggcggacgtgttcatgattccgcagtacggctacctaacgctcaacaatggcagccaggcagtgggacggtcatccttttactgcctggaatatttcccatcgcagatgctgagaacgggcaataactttaccttcagctacaccttcgaggacgtgcctttccacagcagctacgcgcacagccagagcctggaccggctgatgaatcctctcatcgaccagtacctgtattacctgaacagaactcagaatcagtccggaagtgcccaaaacaaggacttgctgtttagccgggggtctccagctggcatgtctgttcagcccaaaaactggctacctggaccctgttaccggcagcagcgcgtttctaaaacaaaaacagacaacaacaacagcaactttacctggactggtgcttcaaaatataaccttaatgggcgtgaatctataatcaaccctggcactgctatggcctcacacaaagacgacaaagacaagttctttcccatgagcggtgtcatgatttttggaaaggagagcgccggagcttcaaacactgcattggacaatgtcatgatcacagacgaagaggaaatcaaagccactaaccccgtggccaccgaaagatttgggactgtggcagtcaatctccagagcagcagcacagaccctgcgaccggagatgtgcatgttatgggagccttacctggaatggtgtggcaagacagagacgtatacctgcagggtcctatttgggccaaaattcctcacacggatggacactttcacccgtctcctctcatgggcggctttggacttaagcacccgcctcctcagatcctcatcaaaaacacgcctgttcctgcgaatcctccggcagagttttcggctacaaagtttgcttcattcatcacccagtattccacaggacaagtgagcgtggagattgaatgggagctgcagaaagaaaacagcaaacgctggaatcccgaagtgcagtatacatctaactatgcaaaatctgccaacgttgatttcactgtggacaacaatggactttatactgagcctcgccccattggcacccgttacctcacccgtcccctgtaa

SEQ ID NO: 1366 - DNA, 2208 bp, Artificial Sequence
  Synthetic polynucleotide
atggctgccgatggttatcttccagattggctcgaggacaacctctctgagggcattcgcgagtggtgggacttgaaacctggagccccgaaacccaaagccaaccagcaaaagcaggacgacggccggggtctggtgcttcctggctacaagtacctcggacccttcaacggactcgacaagggggagcccgtcaacgcggcggatgcagcggccctcgagcacgacaaggcctacgaccagcagctcaaagcgggtgacaatccgtacctgcggtataaccacgccgacgccgagtttcaggagcgtctgcaagaagatacgtcttttgggggcaacctcgggcgagcagtcttccaggccaagaagagggttctcgaaccttttggtctggttgaggaaggtgctaagacggctcctggaaagaaacgtccggtagagcagtcgccacaagagccagactcctcctcgggcattggcaagacaggccagcagcccgctaaaaagagactcaattttggtcagactggcgactcagagtcagtccccgacccacaacctctcggagaacctccagcaacccccgctgctgtgggacctactacaatggcttcaggcggtggcgcaccaatggcagacaataacgaaggcgccgacggagtgggtaatgcctcaggaaattggcattgcgattccacatggctgggcgacagagtcatcaccaccagcacccgaacatgggccttgcccacctataacaaccacctctacaagcaaatctccagtgcttcaggggccagcaacgacaaccactacttcggctacagcaccccctgggggtattttgatttcaacagattccactgccatttctcaccacgtgactggcagcgactcatcaacaacaattggggattccggcccaagagactcaacttcaagctcttcaacatccaagtcaaggaggtcacgacgaatgatggcgtcacgaccatcgctaataaccttaccagcacggttcaagtcttctcggactcggagtaccagttgccgtacgtcctcggctctgcgcaccagggctgcctccctccgttcccggcggacgtgttcatgattccgcagtacggctacctaacgctcaacaatggcagccaggcagtgggacggtcatccttttactgcctggaatatttcccatcgcagatgctgagaacgggcaataactttaccttcagctacaccttcgaggacgtgcctttccacagcagctacgcgcacagccagagcctggaccggctgatgaatcctctcatcgaccagtacctgtattacctgaacagaactcagaatcagtccggaagtgcccaaaacaaggacttgctgtttagccgggggtctccagctggcatgtctgttcagcccaaaaactggctacctggaccctgttaccggcagcagcgcgtttctaaaacaaaaacagacaacaacaacagcaactttacctggactggtgcttcaaaatataaccttaatgggcgtgaatctataatcaaccctggcactgctatggcctcacacaaagacgacgaagacaagttctttcccatgagcggtgtcatgatttttggaaaggagagcgccggagcttcaaacactgcattggacaatgtcatgatcacagacgaagaggaaatcaaagccactaaccccgtggccaccgaaagatttgggactgtggcagtcaatctccagagcagcagcacagaccctgcgaccggagatgtgcatgttatgggagccttacctggaatggtgtggcaagacagagacgtatacctgcagggtcctatttgggccaaaattcctcacacggatggacactttcacccgtctcctctcatgggcggctttggacttaagcacccgcctcctcagatcctcatcaaaaacacgcctgttcctgcgaatcctccggcagagttttcggctacaaagtttgcttcattcatcacccagtattccacaggacaagtgagcgtggagattgaatgggagctgcagaaagaaaacagcaaacgctggaatcccgaagtgcagtatacatctaactatgcaaaatctgccaacgttgatttcactgtggacaacaatggactttatactgagcctcgccccattggcacccgttacctcacccgtcccctgtaa

SEQ ID NO: 1367 - DNA, 2208 bp, Artificial Sequence
  Synthetic polynucleotide
atggctgccgatggttatcttccagattggctcgaggacactctctctgaaggaataagacagtggtggaagctcaaacctggcccaccaccaccaaagcccgcagagcggcataaggacgacagcaggggtcttgtgcttcctgggtacaagtacctcggacccttcaacggactcgacaagggagagccggtcaacgaggcagacgccgcggccctcgagcacgacaaagcctacgaccggcagctcgacagcggagacaacccgtacctcaagtacaaccacgccgacgcggagtttcaggagcgccttaaagaagatacgtcttttgggggcaacctcggacgagcagtcttccaggcgaaaaagagggttcttgaacctctgggcctggttgaggaacctgttaagacggctccgggaaaaaagaggccggtagagcactctcctgtggagccagactcctcctcgggaaccggaaaggcgggccagcagcctgcaagaaaaagattgaattttggtcagactggagacgcagactcagtacctgacccccagcctctcggacagccaccagcagccccctctggtctgggaactaatacgatggctacaggcagtggcgcaccaatggcagacaataacgagggcgccgacggagtgggtaattcctcgggaaattggcattgcgattccacatggatgggcgacagagtcatcaccaccagcacccgaacctgggccctgcccacctacaacaaccacctctacaaacaaatttccagccaatcaggagcctcgaacgacaatcactactttggctacagcaccccttgggggtattttgacttcaacagattccactgccacttttcaccacgtgactggcaaagactcatcaacaacaactggggattccgacccaagagactcaacttcaagctctttaacattcaagtcaaagaggtcacgcagaatgacggtacgacgacgattgccaataaccttaccagcacggttcaggtgtttactgactcggagtaccagctcccgtacgtcctcggctcggcgcatcaaggatgcctcccgccgttcccagcagacgtcttcatggtgccacagtatggatacctcaccctgaacaacgggagtcaggcagtaggacgctcttcattttactgcctggagtactttccttctcagatgctgcgtaccggaaacaactttaccttcagctacacttttgaggacgttcctttccacagcagctacgctcacagccagagtctggaccgtctcatgaatcctctcatcgaccagtacctgtattacttgagcagaacaaacactccaagtggaaccaccacgcagtcaaggcttcagttttctgtggccggacccagtaacatggctgtccagggaaggaactggcttcctggaccctgttaccgccagcagcgagtatcaaagacatctgcggataacaacaacagtgaatttgcttggactggagctaccaagtaccacctcaatggcagagactctctggtgaatccgggcccggccatggcaagccacaaggacgatgaagaaaagttttttcctcagagcggggttctcatctttgggaagcaaggctcagagaaaacaaatgtggacattgaaaaggtcatgattacagacgaagaggaaatcaggacaaccaatcccgtggctacggagcagtatggttctgtatctaccaacctccagcaacagaacacagcaccagctaccgcagatgtcaacacacaaggcgttcttccaggcatggtctggcaggacagagatgtgtaccttcaggggcccatctgggcaaagattccacacacggacggacattttcacccctctcccctcatgggtggattcggacttaaacaccctcctccacagattctcatcaagaacaccccggtacctgcgaatccttcgaccaccttcagtgcggcaaagtttgcttccttcatcacacagtactccacgggacaggtcagcgtggagatcgagtgggagctgcagaaggaaaacagcaaacgctggaatcccgaaattcagtacacttccaactacaacaagtctgttaatgtggactttactgtggacactaatggcgtgtattcagagcctcgccccattggcaccagatacctgactcgtaatctgtaa

SEQ ID NO: 1368 - protein, 735 aa, Artificial Sequence
  Synthetic polypeptide
MAADGYLPDWLEDTLSEGIRQWWKLKPGPPPPKPAERHKDDSRGLVLPGYKYLGPFNGLDKGEPVNEADAAALEHDKAYDRQLDSGDNPYLKYNHADAEFQERLKEDTSFGGNLGRAVFQAKKRVLEPLGLVEEPVKTAPGKKRPVEHSPVEPDSSSGTGKAGQQPARKRLNFGQTGDADSVPDPQPLGQPPAAPSGLGTNTMATGSGAPMADNNEGADGVGNSSGNWHCDSTWMGDRVITTSTRTWALPTYNNHLYKQISSQSGASNDNHYFGYSTPWGYFDFNRFHCHFSPRDWQRLINNNWGFRPKRLNFKLFNIQVKEVTQNDGTTTIANNLTSTVQVFTDSEYQLPYVLGSAHQGCLPPFPADVFMVPQYGYLTLNNGSQAVGRSSFYCLEYFPSQMLRTGNNFTFSYTFEDVPFHSSYAHSQSLDRLMNPLIDQYLYYLSRTNTPSGTTTQSRLQFSVAGPSNMAVQGRNWLPGPCYRQQRVSKTSADNNNSEFAWTGATKYHLNGRDSLVNPGPAMASHKDDEEKFFPQSGVLIFGKQGSEKTNVDIEKVMITDEEEIRTTNPVATEQYGSVSTNLQQQNTAPATADVNTQGVLPGMVWQDRDVYLQGPIWAKIPHTDGHFHPSPLMGGFGLKHPPPQILIKNTPVPANPSTTFSAAKFASFITQYSTGQVSVEIEWELQKENSKRWNPEIQYTSNYNKSVNVDFTVDTNGVYSEPRPIGTRYLTRNL

SEQ ID NO: 1369 - DNA, 2208 bp, Artificial Sequence
  Synthetic polynucleotide
atggctgccgatggttatcttccagattggctcgaggacactctctctgaaggaataagacagtggtggaagctcaaacctggcccaccaccaccaaagcccgcagagcggcataaggacgacagcaggggtcttgtgcttcctgggtacaagtacctcggacccttcaacggactcgacaagggagagccggtcaacgaggcagacgccgcggccctcgagcacgacaaagcctacgaccggcagctcgacagcggagacaacccgtacctcaagtacaaccacgccgacgcggagtttcaggagcgccttaaagaagatacgtcttttgggggcaacctcggacgagcagtcttccaggcgaaaaagaggattcttgaacctctgggcctggttgaggaacctgttaagacggctccgggaaaaaagaggccggtagagcactctcctgcggagccagactcctcctcgggaaccggaaagtcgggccagcagcctgcaagaaaaagattgaattttggtcagactggagacgcagactcagtacctgacccccagcctctcggacagccaccagcagccccctctggtctgggaactaatacgatggcttcaggcagtggcgcaccaatggcagacaataacgagggcgccgacggagtgggtaattcctcgggaaattggcattgcgattccacatggatgggcgacagagtcatcaccaccagcacccgaacctgggccctgcccacctacaacaaccacctctacaaacaaatttccagccaatcaggagcctcgaacgacaatcactactttggctacagcaccccttgggggtattttgacttcaacagattccactgccacttttcaccacgtgactggcaaagactcatcaacaacaactggggattccgacccaagagactcagcttcaagctctttaacattcaagtcaaagaggtcacgcagaatgacggtacgacgacgattgccaataaccttaccagcacggttcaggtgtttactgactcggagtaccagctcccgtacgtcctcggctcggcgcatcaaggatgcctcccgccgttcccagcagacgtcttcatggtgccacagtatggatacctcaccctgaacaacgggagtcaggcagtaggacgctcttcattttactgcctggagtactttccttctcagatgctgcgtaccggaaacaactttaccttcagctacacttttgaggacgttcctttccacagcagctacgctcacagccagagtctggaccgtctcatgaatcctctcatcgaccagtacctgtattacttgagcagaacaaacactccaagtggaaccaccacgatgtcaaggcttcagttttctcaggccggagcgagtgacattcgggaccagtctaggaactggcttcctggaccctgttaccgccagcagcgagtatcaaagacagctgcggataacaacaacagtgattactcgtggactggagctaccaagtaccacctcaatggcagagactctctggtgaatccgggcccggccatggcaagccacaaggacgatgaagaaaagtattttcctcagagcggggttctcatctttgggaagcaagactcaggaaaaacaaatgtggacattgaaaaggtcatgattacagacgaagaggaaatcaggacaaccaatcccgtggctacggagcagtatggttctgtatctaccaacctccagagcggcaacacacaagcagctacctcagatgtcaacacacaaggcgttcttccaggcatggtctggcaggacagagatgtgtaccttcaggggcccatctgggcaaagattccacacacggacggacattttcacccctctcccctcatgggtggattcggacttaaacaccctcctccacagattctcatcaagaacaccccggtacctgcgaatccttcgaccaccttcagtgcggcaaagtttgcttccttcatcacacagtactccacgggacaggtcagcgtggagatcgagtgggagctgcagaaggaaaacagcaaacgctggaatcccgaaattcagtacacttccaactacaacaagtctgttaatgtggactttactgtggacactaatggcgtgtattcagagcctcgccccattggcaccagatacctgactcgtaatctgtaa

SEQ ID NO: 1370 - DNA, 2208 bp, Artificial Sequence
  Synthetic polynucleotide
atggctgccgatggttatcttccagattggctcgaggacactctctctgaaggaataagacagtggtggaagctcaaacctggcccaccaccaccaaagcccgcagagcggcataaggacgacagcaggggtcttgtgcttcctgggtacaagtacctcggacccttcaacggactcgacaagggagagccggtcaacgaggcagacgccgcggccctcgagcacgacaaagcctacgaccggcagctcgacagcggagacaacccgtacctcaagtacaaccacgccgacgcggagtttcaggagcgccttaaagaagatacgtcttttgggggcaacctcggacgagcagtcttccaggcgaaaaagaggattcttgaacctctgggcctggttgaggaacctgttaagacggctccgggaaaaaagaggccggtagagcactctcctgcggagccagactcctcctcgggaaccggaaagtcgggccagcagcctgcaagaaaaagattgaattttggtcagactggagacgcagactcagtacctgacccccagcctctcggacagccaccagcagccccctctggtctgggaactaatacgatggcttcaggcagtggcgcaccaatggcagacaataacgagggcgccgacggagtgggtaattcctcgggaaattggcattgcgattccacatggatgggcgacagagtcatcaccaccagcacccgaacctgggccctgcccacctacaacaaccacctctacaaacaaatttccagccaatcaggagcctcgaacgacaatcactactttggctacagcaccccttgggggtattttgacttcaacagattccactgccacttttcaccacgtgactggcaaagactcatcaacaacaactggggattccgacccaagagactcaacttcaagctctttaacattcaagtcaaagaggtcacgcagaatgacggtacgacgacgattgccaataaccttaccagcacggttcaggtgtttactgactcggagtaccagctcccgtacgtcctcggctcggcgcatcaaggatgcctcccgccgttcccagcagacgtcttcatggtgccacagtatggatacctcaccctgaacaacgggagtcaggcagtaggacgctcttcattttactgcctggagtactttccttctcagatgctgcgtaccggaaacaactttaccttcagctacacttttgaggacgttcctttccacagcagctacgctcacagccagagtctggaccgtctcatgaatcctctcatcgaccagtacctgtattacttgagcagaacaaacactccaagtggaaccaccacgatgtcaaggcttcagttttctcaggccggagcgagtgacattcgggaccagtctaggaactggcttcctggaccctgttaccgccagcagcgagtatcaaagacagctgcggataacaacaacagtgattactcgtggactggagctaccaagtaccacctcaatggcagagactctctggtgaatccgggcccggccatggcaagccacaaggacgatgaagaaaagtattttcctcagagcggggttctcatctttgggaagcaagactcaggaaaaacaaatgtggacattgaaaaggtcatgattacagacgaagaggaaatcaggacaaccaatcccgtggctacggagcagtatggttctgtatctaccaacctccagagcggcaacacacaagcagctacctcagatgtcaacacacaaggcgttcttccaggcatggtctggcaggacagagatgtgtaccttcaggggcccatctgggcaaagattccacacacggacggacattttcacccctctcccctcatgggtggattcggacttaaacaccctcctccacagattctcatcaagaacaccccggtacctgcgaatccttcgaccaccttcagtgcggcaaagtttgcttccttcatcacacagtactccacgggacaggtcagcgtggagatcgagtgggagctgcagaaggaaaacagcaaacgctggaatcccgaaattcagtacacttccaactacaacaagtctgttaatgtggactttactgtggacactaatggcgtgtattcagagcctcgccccattggcaccagatacctgactcgtaatctgtaa

SEQ ID NO: 1371 - protein, 735 aa, Artificial Sequence
  Synthetic polypeptide
MAADGYLPDWLEDTLSEGIRQWWKLKPGPPPPKPAERHKDDSRGLVLPGYKYLGPFNGLDKGEPVNEADAAALEHDKAYDRQLDSGDNPYLKYNHADAEFQERLKEDTSFGGNLGRAVFQAKKRILEPLGLVEEPVKTAPGKKRPVEHSPAEPDSSSGTGKSGQQPARKRLNFGQTGDADSVPDPQPLGQPPAAPSGLGTNTMASGSGAPMADNNEGADGVGNSSGNWHCDSTWMGDRVITTSTRTWALPTYNNHLYKQISSQSGASNDNHYFGYSTPWGYFDFNRFHCHFSPRDWQRLINNNWGFRPKRLNFKLFNIQVKEVTQNDGTTTIANNLTSTVQVFTDSEYQLPYVLGSAHQGCLPPFPADVFMVPQYGYLTLNNGSQAVGRSSFYCLEYFPSQMLRTGNNFTFSYTFEDVPFHSSYAHSQSLDRLMNPLIDQYLYYLSRTNTPSGTTTMSRLQFSQAGASDIRDQSRNWLPGPCYRQQRVSKTAADNNNSDYSWTGATKYHLNGRDSLVNPGPAMASHKDDEEKYFPQSGVLIFGKQDSGKTNVDIEKVMITDEEEIRTTNPVATEQYGSVSTNLQSGNTQAATSDVNTQGVLPGMVWQDRDVYLQGPIWAKIPHTDGHFHPSPLMGGFGLKHPPPQILIKNTPVPANPSTTFSAAKFASFITQYSTGQVSVEIEWELQKENSKRWNPEIQYTSNYNKSVNVDFTVDTNGVYSEPRPIGTRYLTRNL

SEQ ID NO: 1372 - protein, 736 aa, Artificial Sequence
  Synthetic polypeptide
MAADGYLPDWLEDNLSEGIREWWDLKPGAPKPKANQQKQDDGRGLVLPGYKYLGPFNGLDKGEPVNAADAAALEHDKAYDQQLKAGDNPYLRYNHADAEFQERLQEDTSFGGNLGRAVFQAKKRVLEPFGLVEEGAKTAPGKKRPVEQSPQEPDSSSGIGKTGQQPAKKRLNFGQTGDSESVPDPQPLGEPPATPAAVGPTTMASGGGAPMADNNEGADGVGNASGNWHCDSTWLGDRVITTSTRTWALPTYNNHLYKQISSASTGASNDNHYFGYSTPWGYFDFNRFHCHFSPRDWQRLINNNWGFRPKRLNFKLFNIQVKEVTTNDGVTTIANNLTSTVQVFSDSEYQLPYVLGSAHQGCLPPFPADVFMIPQYGYLTLNNGSQAVGRSSFYCLEYFPSQMLRTGNNFTFSYTFEDVPFHSSYAHSQSLDRLMNPLIDQYLYFLNRTQNQSGSAQNKDLLFSRGSPAGMSVQPKNWLPGPCYRQQRVSKTKTDNNNSNFTWTGASKYNLNGRESIINPGTAMASHKDDKDKFFPMSGVMIFGKESAGASNTALDNVMITDEEEIKATNPVATERFGTVAVNLQSSSTDPATGDVHVMGALPGMVWQDRDVYLQGPIWAKIPHTDGHFHPSPLMGGFGLKHPPPQILIKNTPVPANPPAEFSATKFASFITQYSTGQVSVEIEWELQKENSKRWNPEVQYTSNYAKSANVDFTVDNNGLYTEPRPIGTRYLTRPL

SEQ ID NO: 1373 - protein, 747 aa, Artificial Sequence
  Synthetic polypeptide
MAADGYLPDWLEDTLSEGIRQWWKLKPGPPPPKPAERHKDDSRGLVLPGYKYLGPFNGLDKGEPVNEADAAALEHDKAYDRQLDSGDNPYLKYNHADAEFQERLKEDTSFGGNLGRAVFQAKKRVLEPLGLVEEPVKTAPGKKRPVEHSPVEPDSSSGTGKAGQQPARKRLNFGQTGDADSVPDPQPLGQPPAAPSGLGTNTMATGSGAPMADNNEGADGVGNSSGNWHCDSTWMGDRVITTSTRTWALPTYNNHLYKQISSQSGASNDNHYFGYSTPWGYFDFNRFHCHFSPRDWQRLINNNWGFRPKRLNFKLFNIQVKEVTQNDGTTTIANNLTSTVQVFTDSEYQLPYVLGSAHQGCLPPFPADVFMVPQYGYLTLNNGSQAVGRSSFYCLEYFPSQMLRTGNNFTFSYTFEDVPFHSSYAHSQSLDRLMNPLIDQYLYYLSRTNTPSGTTTQSRLQFSQAGASDIRDQSRNWLPGPCYRQQRVSKTSADNNNSEYSWTGATKYHLNGRDSLVNPGPAMASHKDDEEKFFPQSGVLIFGKQGSEKTNVDIEKVMITDEEEIRTTNPVATEQYGSVSTNLQRGNAAAGSTPPPMAARQAATADVNTQGVLPGMVWQDRDVYLQGPIWAKIPHTDGHFHPSPLMGGFGLKHPPPQILIKNTPVPANPSTTFSAAKFASFITQYSTGQVSVEIEWELQKENSKRWNPEIQYTSNYNKSVNVDFTVDTNGVYSEPRPIGTRYLTRNL

SEQ ID NO: 1374 - protein, 747 aa, Artificial Sequence
  Synthetic polypeptide
MAADGYLPDWLEDTLSEGIRQWWKLKPGPPPPKPAERHKDDSRGLVLPGYKYLGPFNGLDKGEPVNEADAAALEHDKAYDRQLDSGDNPYLKYNHADAEFQERLKEDTSFGGNLGRAVFQAKKRVLEPLGLVEEPVKTAPGKKRPVEHSPVEPDSSSGTGKAGQQPARKRLNFGQTGDADSVPDPQPLGQPPAAPSGLGTNTMATGSGAPMADNNEGADGVGNSSGNWHCDSTWMGDRVITTSTRTWALPTYNNHLYKQISSQSGASNDNHYFGYSTPWGYFDFNRFHCHFSPRDWQRLINNNWGFRPKRLNFKLFNIQVKEVTQNDGTTTIANNLTSTVQVFTDSEYQLPYVLGSAHQGCLPPFPADVFMVPQYGYLTLNNGSQAVGRSSFYCLEYFPSQMLRTGNNFTFSYTFEDVPFHSSYAHSQSLDRLMNPLIDQYLYYLSRTNTPSGTTTQSRLQFSQAGASDIRDQSRNWLPGPCYRQQRVSKTSADNNNSEYSWTGATKYHLNGRDSLVNPGPAMASHKDDEEKFFPQSGVLIFGKQGSEKTNVDIEKVMITDEEEIRTTNPVATEQYGSVSTNLQRGNAAAGETRAPLAARQAATADVNTQGVLPGMVWQDRDVYLQGPIWAKIPHTDGHFHPSPLMGGFGLKHPPPQILIKNTPVPANPSTTFSAAKFASFITQYSTGQVSVEIEWELQKENSKRWNPEIQYTSNYNKSVNVDFTVDTNGVYSEPRPIGTRYLTRNL

SEQ ID NO: 1375 - protein, 10 aa, Artificial Sequence
  Synthetic peptide
VNLTWSRASG

SEQ ID NO: 1376 - protein, 14 aa, Artificial Sequence
  Synthetic peptide
EFCINHRGYWVCGD

SEQ ID NO: 1377 - protein, 11 aa, Artificial Sequence
  Synthetic peptide
EDGQVMDVDLS

SEQ ID NO: 1378 - protein, 9 aa, Artificial Sequence
  Synthetic peptide
EKQRNGTLT

SEQ ID NO: 1379 - protein, 17 aa, Artificial Sequence
  Synthetic peptide
TYQCRVTHPHLPRALMR

SEQ ID NO: 1380 - protein, 14 aa, Artificial Sequence
  Synthetic peptide
RHSTTQPRKTKGSG

SEQ ID NO: 1381 - protein, 13 aa, Artificial Sequence
  Synthetic peptide
DSNPRGVSAYLSR

SEQ ID NO: 1382 - protein, 12 aa, Artificial Sequence
  Synthetic peptide
TITCLWDLAPSK

SEQ ID NO: 1383 - protein, 10 aa, Artificial Sequence
  Synthetic peptide
KTKGSGFFVF

SEQ ID NO: 1384 - protein, 12 aa, Artificial Sequence
  Synthetic peptide
THPHLPRALMRS

SEQ ID NO: 1385 - protein, 23 aa, Artificial Sequence
  Synthetic peptide
GETYQCRVTHPHLPRALMRSTTK

SEQ ID NO: 1386 - protein, 8 aa, Artificial Sequence
  Synthetic peptide
LPRALMRS

SEQ ID NO: 1387 - protein, 8 aa, Artificial Sequence
  Synthetic peptide
INHRGYWV

SEQ ID NO: 1388 - protein, 12 aa, Artificial Sequence
  Synthetic peptide
CDAGSVRTNAPD

SEQ ID NO: 1389 - protein, 17 aa, Artificial Sequence
  Synthetic peptide
AKAVSNLTESRSESLQS

SEQ ID NO: 1390 - protein, 13 aa, Artificial Sequence
  Synthetic peptide
SLTGDEFKKVLET

SEQ ID NO: 1391 - protein, 11 aa, Artificial Sequence
  Synthetic peptide
REAVAYRFEED

SEQ ID NO: 1392 - protein, 10 aa, Artificial Sequence
  Synthetic peptide
INPEIITLDG

SEQ ID NO: 1393 - protein, 15 aa, Artificial Sequence
  Synthetic peptide
DISVTGAPVITATYL

SEQ ID NO: 1394 - protein, 12 aa, Artificial Sequence
  Synthetic peptide
DISVTGAPVITA

SEQ ID NO: 1395 - protein, 17 aa, Artificial Sequence
  Synthetic peptide
PKTVSNLTESSSESVQS

SEQ ID NO: 1396 - protein, 13 aa, Artificial Sequence
  Synthetic peptide
SLMGDEFKAVLET

SEQ ID NO: 1397 - protein, 11 aa, Artificial Sequence
  Synthetic peptide
QHSVAYTFEED

SEQ ID NO: 1398 - protein, 10 aa, Artificial Sequence
  Synthetic peptide
INPEIITRDG

SEQ ID NO: 1399 - protein, 15 aa, Artificial Sequence
  Synthetic peptide
DISLTGDPVITASYL

SEQ ID NO: 1400 - protein, 12 aa, Artificial Sequence
  Synthetic peptide
DISLTGDPVITA

SEQ ID NO: 1401 - protein, 11 aa, Artificial Sequence
  Synthetic peptide
DQSIDFEIDSA

SEQ ID NO: 1402 - protein, 20 aa, Artificial Sequence
  Synthetic peptide
KNVSEDLPLPTFSPTLLGDS

SEQ ID NO: 1403 - protein, 11 aa, Artificial Sequence
  Synthetic peptide
KNVSEDLPLPT

SEQ ID NO: 1404 - protein, 12 aa, Artificial Sequence
  Synthetic peptide
CDSGRVRTDAPD

SEQ ID NO: 1405 - protein, 14 aa, Artificial Sequence
  Synthetic peptide
FPEHLLVDFLQSLS

SEQ ID NO: 1406 - protein, 9 aa, Artificial Sequence
  Synthetic peptide
DAEFRHDSG

SEQ ID NO: 1407 - protein, 16 aa, Artificial Sequence
  Synthetic peptide
HYAAAQWDFGNTMCQL

SEQ ID NO: 1408 - protein, 13 aa, Artificial Sequence
  Synthetic peptide
YAAQWDFGNTMCQ

SEQ ID NO: 1409 - protein, 10 aa, Artificial Sequence
  Synthetic peptide
RSQKEGLHYT

SEQ ID NO: 1410 - protein, 19 aa, Artificial Sequence
  Synthetic peptide
SSRTPSDKPVAHWANPQAE

SEQ ID NO: 1411 - protein, 15 aa, Artificial Sequence
  Synthetic peptide
SRTPSDKPVAHWANP

SEQ ID NO: 1412 - protein, 9 aa, Artificial Sequence
  Synthetic peptide
SSRTPSDKP

SEQ ID NO: 1413 - protein, 14 aa, Artificial Sequence
  Synthetic peptide
NADGNVDYHMNSVP

SEQ ID NO: 1414 - protein, 11 aa, Artificial Sequence
  Synthetic peptide
DGNVDYHMNSV

SEQ ID NO: 1415 - protein, 16 aa, Artificial Sequence
  Synthetic peptide
RSFKEFLQSSLRALRQ

SEQ ID NO: 1416 - protein, 11 aa, Artificial Sequence
  Synthetic peptide
FKEFLQSSLRA

SEQ ID NO: 1417 - protein, 10 aa, Artificial Sequence
  Synthetic peptide
QMWAPQWGPD

SEQ ID NO: 1418 - protein, 6 aa, Artificial Sequence
  Synthetic peptide
RGNRQA

SEQ ID NO: 1419 - protein, 6 aa, Artificial Sequence
  Synthetic peptide
SSSTDP

SEQ ID NO: 1420 - protein, 6 aa, Artificial Sequence
  Synthetic peptide
SSNTAP

SEQ ID NO: 1421 - protein, 6 aa, Artificial Sequence
  Synthetic peptide
SNSNLP

SEQ ID NO: 1422 - protein, 6 aa, Artificial Sequence
  Synthetic peptide
SSTTAP

SEQ ID NO: 1423 - protein, 6 aa, Artificial Sequence
  Synthetic peptide
AANTAA

SEQ ID NO: 1424 - protein, 6 aa, Artificial Sequence
  Synthetic peptide
QQNTAP

SEQ ID NO: 1425 - protein, 6 aa, Artificial Sequence
  Synthetic peptide
SAQAQA

SEQ ID NO: 1426 - protein, 6 aa, Artificial Sequence
  Synthetic peptide
QANTGP

SEQ ID NO: 1427 - protein, 6 aa, Artificial Sequence
  Synthetic peptide
NATTAP

SEQ ID NO: 1428 - protein, 6 aa, Artificial Sequence
  Synthetic peptide
SSTAGP

SEQ ID NO: 1429 - protein, 6 aa, Artificial Sequence
  Synthetic peptide
QQNTAA

SEQ ID NO: 1430 - protein, 6 aa, Artificial Sequence
  Synthetic peptide
PSTAGP

SEQ ID NO: 1431 - protein, 6 aa, Artificial Sequence
  Synthetic peptide
NQNTAP

SEQ ID NO: 1432 - protein, 6 aa, Artificial Sequence
  Synthetic peptide
QAANAP

SEQ ID NO: 1433 - protein, 6 aa, Artificial Sequence
  Synthetic peptide
SIVGLP

SEQ ID NO: 1434 - protein, 6 aa, Artificial Sequence
  Synthetic peptide
AASTAA

SEQ ID NO: 1435 - protein, 6 aa, Artificial Sequence
  Synthetic peptide
SQNTTA

SEQ ID NO: 1436 - protein, 6 aa, Artificial Sequence
  Synthetic peptide
QQDTAP

SEQ ID NO: 1437 - protein, 6 aa, Artificial Sequence
  Synthetic peptide
QTNTGP

SEQ ID NO: 1438 - protein, 6 aa, Artificial Sequence
  Synthetic peptide
QTNGAP

SEQ ID NO: 1439 - protein, 6 aa, Artificial Sequence
  Synthetic peptide
QQNAAP

SEQ ID NO: 1440 - protein, 6 aa, Artificial Sequence
  Synthetic peptide
AANTQA

SEQ ID NO: 1441 - protein, 6 aa, Artificial Sequence
  Synthetic peptide
NGRAHA

SEQ ID NO: 1442 - protein, 7 aa, Artificial Sequence
  Synthetic peptide
QPEHSST

SEQ ID NO: 1443 - protein, 7 aa, Artificial Sequence
  Synthetic peptide
VNTANST

SEQ ID NO: 1444 - protein, 7 aa, Artificial Sequence
  Synthetic peptide
HGPMQKS

SEQ ID NO: 1445 - protein, 7 aa, Artificial Sequence
  Synthetic peptide
PHKPPLA

SEQ ID NO: 1446 - protein, 7 aa, Artificial Sequence
  Synthetic peptide
IKNNEMW

SEQ ID NO: 1447 - protein, 7 aa, Artificial Sequence
  Synthetic peptide
RNLDTPM

SEQ ID NO: 1448 - protein, 7 aa, Artificial Sequence
  Synthetic peptide
VDSHRQS

SEQ ID NO: 1449 - protein, 7 aa, Artificial Sequence
  Synthetic peptide
YDSKTKT

SEQ ID NO: 1450 - protein, 7 aa, Artificial Sequence
  Synthetic peptide
SQLPHQK

SEQ ID NO: 1451 - protein, 7 aa, Artificial Sequence
  Synthetic peptide
STMQQNT

SEQ ID NO: 1452 - protein, 7 aa, Artificial Sequence
  Synthetic peptide
TERYMTQ

SEQ ID NO: 1453 - protein, 7 aa, Artificial Sequence
  Synthetic peptide
DASLSTS

SEQ ID NO: 1454 - protein, 7 aa, Artificial Sequence
  Synthetic peptide
DLPNKKT

SEQ ID NO: 1455 - protein, 7 aa, Artificial Sequence
  Synthetic peptide
DLTAARL

SEQ ID NO: 1456 - protein, 7 aa, Artificial Sequence
  Synthetic peptide
EPHQFNY

SEQ ID NO: 1457 - protein, 7 aa, Artificial Sequence
  Synthetic peptide
EPQSNHT

SEQ ID NO: 1458 - protein, 7 aa, Artificial Sequence
  Synthetic peptide
MSSWPSQ

SEQ ID NO: 1459 - protein, 7 aa, Artificial Sequence
  Synthetic peptide
NPKHNAT

SEQ ID NO: 1460 - protein, 7 aa, Artificial Sequence
  Synthetic peptide
PDGMRTT

SEQ ID NO: 1461 - protein, 7 aa, Artificial Sequence
  Synthetic peptide
PNNNKTT

SEQ ID NO: 1462 - protein, 7 aa, Artificial Sequence
  Synthetic peptide
QSTTHDS

SEQ ID NO: 1463 - protein, 7 aa, Artificial Sequence
  Synthetic peptide
TGSKQKQ

SEQ ID NO: 1464 - protein, 7 aa, Artificial Sequence
  Synthetic peptide
SLKHQAL

SEQ ID NO: 1465 - protein, 7 aa, Artificial Sequence
  Synthetic peptide
SPIDGEQ

SEQ ID NO: 1466 - protein, 8 aa, Artificial Sequence
  Synthetic peptide
WIFPWIQL

SEQ ID NO: 1467 - protein, 9 aa, Artificial Sequence
  Synthetic peptide
CDCRGDCFC

SEQ ID NO: 1468 - protein, 5 aa, Artificial Sequence
  Synthetic peptide
CNGRC

SEQ ID NO: 1469 - protein, 7 aa, Artificial Sequence
  Synthetic peptide
CPRECES

SEQ ID NO: 1470 - protein, 10 aa, Artificial Sequence
  Synthetic peptide
CTTHWGFTLC

SEQ ID NO: 1471 - protein, 9 aa, Artificial Sequence
  Synthetic peptide
CGRRAGGSC

SEQ ID NO: 1472 - protein, 9 aa, Artificial Sequence
  Synthetic peptide
CKGGRAKDC

SEQ ID NO: 1473 - protein, 9 aa, Artificial Sequence
  Synthetic peptide
CVPELGHEC

SEQ ID NO: 1474 - protein, 9 aa, Artificial Sequence
  Synthetic peptide
CRRETAWAK

SEQ ID NO: 1475 - protein, 14 aa, Artificial Sequence
  Synthetic peptide
VSWFSHRYSPFAVS

SEQ ID NO: 1476 - protein, 13 aa, Artificial Sequence
  Synthetic peptide
GYRDGYAGPILYN

SEQ ID NO: 1477 - protein, 7 aa, Artificial Sequence
  Synthetic peptide
  MOD_RES (1)..(3): Any naturally occurring amino acid
  MOD_RES (5)..(7): Any naturally occurring amino acid
XXXYXXX

SEQ ID NO: 1478 - protein, 4 aa, Artificial Sequence
  Synthetic peptide
  SITE (1)..(4): /note="Variant residues given in the sequence have no preference with respect to those in the annotations for variant positions"
  VARIANT (2)..(2): Xaa denotes Glu or Met
YXNW

SEQ ID NO: 1479 - protein, 7 aa, Artificial Sequence
  Synthetic peptide
RPLPPLP

SEQ ID NO: 1480 - protein, 7 aa, Artificial Sequence
  Synthetic peptide
APPLPPR

SEQ ID NO: 1481 - protein, 12 aa, Artificial Sequence
  Synthetic peptide
DVFYPYPYASGS

SEQ ID NO: 1482 - protein, 6 aa, Artificial Sequence
  Synthetic peptide
MYWYPY

SEQ ID NO: 1483 - protein, 12 aa, Artificial Sequence
  Synthetic peptide
DITWDQLWDLMK

SEQ ID NO: 1484 - protein, 8 aa, Artificial Sequence
  Synthetic peptide
  SITE (1)..(8): /note="Variant residues given in the sequence have no preference with respect to those in the annotations for variant positions"
  VARIANT (5)..(5): Xaa denotes Gly or Leu
CWDDXWLC

SEQ ID NO: 1485 - protein, 14 aa, Artificial Sequence
  Synthetic peptide
EWCEYLGGYLRCYA

SEQ ID NO: 1486 - protein, 14 aa, Artificial Sequence
  Synthetic peptide
  MOD_RES (2)..(2): Any naturally occurring amino acid
  MOD_RES (4)..(5): Any naturally occurring amino acid
  MOD_RES (8)..(8): Any naturally occurring amino acid
  MOD_RES (11)..(11): Any naturally occurring amino acid
  MOD_RES (13)..(13): Any naturally occurring amino acid
YXCXXGPXTWXCXP

SEQ ID NO: 1487 - protein, 14 aa, Artificial Sequence
  Synthetic peptide
IEGPTLRQWLAARA

SEQ ID NO: 1488 - protein, 5 aa, Artificial Sequence
  Synthetic peptide
  SITE (1)..(5): /note="Variant residues given in the sequence have no preference with respect to those in the annotations for variant positions"
  MOD_RES (3)..(4): Any naturally occurring amino acid
  VARIANT (5)..(5): Xaa denotes Trp or Phe or His or Tyr
LWXXX

SEQ ID NO: 1489 - protein, 7 aa, Artificial Sequence
  Synthetic peptide
  MOD_RES (1)..(1): Any naturally occurring amino acid
  MOD_RES (3)..(4): Any naturally occurring amino acid
XFXXYLW

SEQ ID NO: 1490 - protein, 13 aa, Artificial Sequence
  Synthetic peptide
SSIISHFRWGLCD

SEQ ID NO: 1491 - protein, 13 aa, Artificial Sequence
  Synthetic peptide
MSRPACPPNDKYE

SEQ ID NO: 1492 - protein, 8 aa, Artificial Sequence
  Synthetic peptide
CLRSGRGC

SEQ ID NO: 1493 - protein, 9 aa, Artificial Sequence
  Synthetic peptide
CHWMFSPWC

SEQ ID NO: 1494 - protein, 4 aa, Artificial Sequence
  Synthetic peptide
  MOD_RES (2)..(3): Any naturally occurring amino acid
WXXF

SEQ ID NO: 1495 - protein, 8 aa, Artificial Sequence
  Synthetic peptide
CSSRLDAC

SEQ ID NO: 1496 - protein, 7 aa, Artificial Sequence
  Synthetic peptide
CLPVASC

SEQ ID NO: 1497 - protein, 13 aa, Artificial Sequence
  Synthetic peptide
CGFECVRQCPERC

SEQ ID NO: 1498 - protein, 13 aa, Artificial Sequence
  Synthetic peptide
CVALCREACGEGC

SEQ ID NO: 1499 - protein, 9 aa, Artificial Sequence
  Synthetic peptide
SWCEPGWCR

SEQ ID NO: 1500 - protein, 7 aa, Artificial Sequence
  Synthetic peptide
YSGKWGW

SEQ ID NO: 1501 - protein, 7 aa, Artificial Sequence
  Synthetic peptide
GLSGGRS

SEQ ID NO: 1502 - protein, 7 aa, Artificial Sequence
  Synthetic peptide
LMLPRAD

SEQ ID NO: 1503 - protein, 9 aa, Artificial Sequence
  Synthetic peptide
CSCFRDVCC

SEQ ID NO: 1504 - protein, 9 aa, Artificial Sequence
  Synthetic peptide
CRDVVSVIC

SEQ ID NO: 1505 - protein, 6 aa, Artificial Sequence
  Synthetic peptide
MARSGL

SEQ ID NO: 1506 - protein, 6 aa, Artificial Sequence
  Synthetic peptide
MARAKE

SEQ ID NO: 1507 - protein, 6 aa, Artificial Sequence
  Synthetic peptide
MSRTMS

SEQ ID NO: 1508 - protein, 6 aa, Artificial Sequence
  Synthetic peptide
KCCYSL

SEQ ID NO: 1509 - protein, 14 aa, Artificial Sequence
  Synthetic peptide
MYWGDSHWLQYWYE

SEQ ID NO: 1510 - protein, 7 aa, Artificial Sequence
  Synthetic peptide
MQLPLAT

SEQ ID NO: 1511 - protein, 4 aa, Artificial Sequence
  Synthetic peptide
EWLS

SEQ ID NO: 1512 - protein, 4 aa, Artificial Sequence
  Synthetic peptide
SNEW

SEQ ID NO: 1513 - protein, 4 aa, Artificial Sequence
  Synthetic peptide
TNYL

SEQ ID NO: 1514 - protein, 12 aa, Artificial Sequence
  Synthetic peptide
WDLAWMFRLPVG

SEQ ID NO: 1515 - protein, 13 aa, Artificial Sequence
  Synthetic peptide
CTVALPGGYVRVC

SEQ ID NO: 1516 - protein, 13 aa, Artificial Sequence
  Synthetic peptide
CVAYCIEHHCWTC

SEQ ID NO: 1517 - protein, 12 aa, Artificial Sequence
  Synthetic peptide
CVFAHNYDYLVC

SEQ ID NO: 1518 - protein, 10 aa, Artificial Sequence
  Synthetic peptide
CVFTSNYAFC

SEQ ID NO: 1519 - protein, 7 aa, Artificial Sequence
  Synthetic peptide
VHSPNKK

SEQ ID NO: 1520 - protein, 7 aa, Artificial Sequence
  Synthetic peptide
CRGDGWC

SEQ ID NO: 1521 - protein, 6 aa, Artificial Sequence
  Synthetic peptide
  MOD_RES (1)..(1): Any naturally occurring amino acid
  MOD_RES (6)..(6): Any naturally occurring amino acid
XRGCDX

SEQ ID NO: 1522 - protein, 4 aa, Artificial Sequence
  Synthetic peptide
  MOD_RES (2)..(4): Any naturally occurring amino acid
PXXX

SEQ ID NO: 1523 - protein, 11 aa, Artificial Sequence
  Synthetic peptide
SGKGPRQITAL

SEQ ID NO: 1524 - protein, 14 aa, Artificial Sequence
  Synthetic peptide
  MISC_FEATURE (1)..(14): Xaa denotes Arg or Lys
  SITE (1)..(14): /note="Variant residues given in the sequence have no preference with respect to those in the annotations for variant positions"
  MISC_FEATURE (10)..(10): Xaa denotes Ala or Gln
  MISC_FEATURE (11)..(11): Xaa denotes Asn or Ala
  MISC_FEATURE (12)..(12): Xaa denotes Leu or Tyr
  MOD_RES (12)..(14): Any naturally occurring amino acid
  MISC_FEATURE (13)..(13): Xaa denotes Thr or Val or Met or Arg
AAAAAAAAAXXXXX

SEQ ID NO: 1525 - protein, 6 aa, Artificial Sequence
  Synthetic peptide
VYMSPF

SEQ ID NO: 1526 - protein, 7 aa, Artificial Sequence
  Synthetic peptide
ATWLPPR

SEQ ID NO: 1527 - protein, 12 aa, Artificial Sequence
  Synthetic peptide
HTMYYHHYQHHL

SEQ ID NO: 1528 - protein, 19 aa, Artificial Sequence
  Synthetic peptide
SEVGCRAGPLQWLCEKYFG

SEQ ID NO: 1529 - protein, 18 aa, Artificial Sequence
  Synthetic peptide
CGLLPVGRPDRNVWRWLC

SEQ ID NO: 1530 - protein, 15 aa, Artificial Sequence
  Synthetic peptide
CKGQCDRFKGLPWEC

SEQ ID NO: 1531 - protein, 5 aa, Artificial Sequence
  Synthetic peptide
SGRSA

SEQ ID NO: 1532 - protein, 4 aa, Artificial Sequence
  Synthetic peptide
WGFP

SEQ ID NO: 1533 - protein, 17 aa, Artificial Sequence
  Synthetic peptide
AEPMPHSLNFSQYLWYT

SEQ ID NO: 1534 - protein, 6 aa, Artificial Sequence
  Synthetic peptide
  SITE (1)..(6): /note="Variant residues given in the sequence have no preference with respect to those in the annotations for variant positions"
  VARIANT (4)..(4): Xaa denotes Trp or Phe
WAYXSP

SEQ ID NO: 1535 - protein, 7 aa, Artificial Sequence
  Synthetic peptide
IELLQAR

SEQ ID NO: 1536 - protein, 16 aa, Artificial Sequence
  Synthetic peptide
AYTKCSRQWRTCMTTH

SEQ ID NO: 1537 - protein, 15 aa, Artificial Sequence
  Synthetic peptide
PQNSKIPGPTFLDPH

SEQ ID NO: 1538 - protein, 15 aa, Artificial Sequence
  Synthetic peptide
SMEPALPDWWWKMFK

SEQ ID NO: 1539 - protein, 16 aa, Artificial Sequence
  Synthetic peptide
ANTPCGPYTHDCPVKR

SEQ ID NO: 1540 - protein, 12 aa, Artificial Sequence
  Synthetic peptide
TACHQHVRMVRP

SEQ ID NO: 1541 - protein, 12 aa, Artificial Sequence
  Synthetic peptide
VPWMEPAYQRFL

SEQ ID NO: 1542 - protein, 8 aa, Artificial Sequence
  Synthetic peptide
DPRATPGS

SEQ ID NO: 1543 - protein, 12 aa, Artificial Sequence
  Synthetic peptide
FRPNRAQDYNTN

SEQ ID NO: 1544 - protein, 9 aa, Artificial Sequence
  Synthetic peptide
CTKNSYLMC

SEQ ID NO: 1545 - protein, 11 aa, Artificial Sequence
  Synthetic peptide
  SITE (1)..(11): /note="Variant residues given in the sequence have no preference with respect to those in the annotations for variant positions"
  MISC_FEATURE (2)..(2): Xaa denotes Gln or Arg
  MISC_FEATURE (3)..(3): Xaa denotes Leu or Arg
  MISC_FEATURE (5)..(5): Xaa denotes Gly or Asn
  MISC_FEATURE (6)..(7): Xaa denotes any amino acid residue
  MISC_FEATURE (9)..(9): Xaa denotes Ala or Val
CXXTXXXGXGC

SEQ ID NO: 1546 - protein, 9 aa, Artificial Sequence
  Synthetic peptide
CPIEDRPMC

SEQ ID NO: 1547 - protein, 12 aa, Artificial Sequence
  Synthetic peptide
HEWSYLAPYPWF

SEQ ID NO: 1548 - protein, 9 aa, Artificial Sequence
  Synthetic peptide
MCPKHPLGC

SEQ ID NO: 1549 - protein, 15 aa, Artificial Sequence
  Synthetic peptide
RMWPSSTVNLSAGRR

SEQ ID NO: 1550 - protein, 20 aa, Artificial Sequence
  Synthetic peptide
SAKTAVSQRVWLPSHRGGEP

SEQ ID NO: 1551 - protein, 20 aa, Artificial Sequence
  Synthetic peptide
KSREHVNNSACPSKRITAAL

SEQ ID NO: 1552 - protein, 4 aa, Artificial Sequence
  Synthetic peptide
EGFR

SEQ ID NO: 1553 - protein, 6 aa, Artificial Sequence
  Synthetic peptide
AGLGVR

SEQ ID NO: 1554 - protein, 15 aa, Artificial Sequence
  Synthetic peptide
GTRQGHTMRLGVSDG

SEQ ID NO: 1555 - protein, 15 aa, Artificial Sequence
  Synthetic peptide
IAGLATPGWSHWLAL

SEQ ID NO: 1556 - protein, 7 aa, Artificial Sequence
  Synthetic peptide
SMSIARL

SEQ ID NO: 1557 - protein, 7 aa, Artificial Sequence
  Synthetic peptide
HTFEPGV

SEQ ID NO: 1558 - protein, 15 aa, Artificial Sequence
  Synthetic peptide
NTSLKRISNKRIRRK

SEQ ID NO: 1559 - protein, 15 aa, Artificial Sequence
  Synthetic peptide
LRIKRKRRKRKKTRK

SEQ ID NO: 1560 - DNA, 21 bp, Adeno-associated virus 2
agcvvmdcaggarscascaac

SEQ ID NO: 1561 - protein, 7 aa, Artificial Sequence
  Synthetic peptide"
SDSGASN

SEQ ID NO: 1562 - protein, 7 aa, Artificial Sequence
  Synthetic peptide
SPSGASN

SEQ ID NO: 1563 - protein, 7 aa, Artificial Sequence
  Synthetic peptide
SHSGASN

SEQ ID NO: 1564 - protein, 7 aa, Artificial Sequence
  Synthetic peptide
SRSGASN

SEQ ID NO: 1565 - protein, 7 aa, Artificial Sequence
  Synthetic peptide
SKSGASN

SEQ ID NO: 1566 - protein, 7 aa, Artificial Sequence
  Synthetic peptide
SNSGASN

SEQ ID NO: 1567 - protein, 7 aa, Artificial Sequence
  Synthetic peptide
SGSGASN

SEQ ID NO: 1568 - protein, 7 aa, Artificial Sequence
  Synthetic peptide
SASGASN

SEQ ID NO: 1569 - protein, 7 aa, Artificial Sequence
  Synthetic peptide
SESGTSN

SEQ ID NO: 1570 - protein, 7 aa, Artificial Sequence
  Synthetic peptide
STTGGSN

SEQ ID NO: 1571 - protein, 7 aa, Artificial Sequence
  Synthetic peptide
SSAGSTN

SEQ ID NO: 1572 - protein, 6 aa, Artificial Sequence
  Synthetic peptide
NNDSQA

SEQ ID NO: 1573 - protein, 6 aa, Artificial Sequence
  Synthetic peptide
NNRNQA

SEQ ID NO: 1574 - protein, 6 aa, Artificial Sequence
  Synthetic peptide
NNNKQA

SEQ ID NO: 1575 - protein, 6 aa, Artificial Sequence
  Synthetic peptide
NAKRQA

SEQ ID NO: 1576 - protein, 6 aa, Artificial Sequence
  Synthetic peptide
NDEHQA

SEQ ID NO: 1577 - protein, 6 aa, Artificial Sequence
  Synthetic peptide
NTSQKA

SEQ ID NO: 1578 - protein, 25 aa, Artificial Sequence
  Synthetic peptide
YYLSRTNTPSGTDTQSRLVFSQAGA

SEQ ID NO: 1579 - protein, 25 aa, Artificial Sequence
  Synthetic peptide
YYLSRTNTDSGTETQSGLDFSQAGA

SEQ ID NO: 1580 - protein, 25 aa, Artificial Sequence
  Synthetic peptide
YYLSRTNTESGTPTQSALEFSQAGA

SEQ ID NO: 1581 - protein, 25 aa, Artificial Sequence
  Synthetic peptide
YYLSRTNTHSGTHTQSPLHFSQAGA

SEQ ID NO: 1582 - protein, 25 aa, Artificial Sequence
  Synthetic peptide
YYLSRTNTSSGTITISHLIFSQAGA

SEQ ID NO: 1583 - protein, 25 aa, Artificial Sequence
  Synthetic peptide
YYLSRTNTRSGIMTKSSLMFSQAGA

SEQ ID NO: 1584 - protein, 25 aa, Artificial Sequence
  Synthetic peptide
YYLSRTNTKSGRKTLSNLSFSQAGA

SEQ ID NO: 1585 - protein, 25 aa, Artificial Sequence
  Synthetic peptide
YYLSRTNDGSGPVTPSKLRFSQRGA

SEQ ID NO: 1586 - protein, 25 aa, Artificial Sequence
  Synthetic peptide
YYLSRTNAASGHATHSDLKFSQPGA

SEQ ID NO: 1587 - protein, 25 aa, Artificial Sequence
  Synthetic peptide
YYLSRTNGQAGSLTMSELGFSQVGA

SEQ ID NO: 1588 - protein, 25 aa, Artificial Sequence
  Synthetic peptide
YYLSRTNSTGGNQTTSQLLFSQLSA

SEQ ID NO: 1589 - protein, 25 aa, Artificial Sequence
  Synthetic peptide
YFLSRTNNNTGLNTNSTLNFSQGRA

SEQ ID NO: 1590 - protein, 16 aa, Artificial Sequence
  Synthetic peptide
SKTGADNNNSEYSWTG

SEQ ID NO: 1591 - protein, 16 aa, Artificial Sequence
  Synthetic peptide
SKTDADNNNSEYSWTG

SEQ ID NO: 1592 - protein, 16 aa, Artificial Sequence
  Synthetic peptide
SKTEADNNNSEYSWTG

SEQ ID NO: 1593 - protein, 16 aa, Artificial Sequence
  Synthetic peptide
SKTPADNNNSEYSWTG

SEQ ID NO: 1594 - protein, 16 aa, Artificial Sequence
  Synthetic peptide
SKTHADNNNSEYSWTG

SEQ ID NO: 1595 - protein, 16 aa, Artificial Sequence
  Synthetic peptide
SKTQADNNNSEYSWTG

SEQ ID NO: 1596 - protein, 16 aa, Artificial Sequence
  Synthetic peptide
SKTIADNNNSEYSWTG

SEQ ID NO: 1597 - protein, 16 aa, Artificial Sequence
  Synthetic peptide
SKTMADNNNSEYSWTG

SEQ ID NO: 1598 - protein, 16 aa, Artificial Sequence
  Synthetic peptide
SKTRADNNNSEYSWTG

SEQ ID NO: 1599 - protein, 16 aa, Artificial Sequence
  Synthetic peptide
SKTNADNNNSEYSWTG

SEQ ID NO: 1600 - protein, 16 aa, Artificial Sequence
  Synthetic peptide
SKTVGRNNNSEYSWTG

SEQ ID NO: 1601 - protein, 16 aa, Artificial Sequence
  Synthetic peptide"
SKTADRNNNSEYSWTG

SEQ ID NO: 1602 - protein, 16 aa, Artificial Sequence
  Synthetic peptide
SKKLSQNNNSKYSWQG

SEQ ID NO: 1603 - protein, 16 aa, Artificial Sequence
  Synthetic peptide
SKPTTGNNNSDYSWPG

SEQ ID NO: 1604 - protein, 16 aa, Artificial Sequence
  Synthetic peptide
STQKNENNNSNYSWPG

SEQ ID NO: 1605 - protein, 8 aa, Artificial Sequence
  Synthetic peptide
HKDDEGKF

SEQ ID NO: 1606 - protein, 8 aa, Artificial Sequence
  Synthetic peptide
HKDDNRKF

SEQ ID NO: 1607 - protein, 8 aa, Artificial Sequence
  Synthetic peptide
HKDDTNKF

SEQ ID NO: 1608 - protein, 8 aa, Artificial Sequence
  Synthetic peptide
HEDSDKNF

SEQ ID NO: 1609 - protein, 8 aa, Artificial Sequence
  Synthetic peptide
HRDGADSF

SEQ ID NO: 1610 - protein, 8 aa, Artificial Sequence
  Synthetic peptide
HGDNKSRF

SEQ ID NO: 1611 - protein, 14 aa, Artificial Sequence
  Synthetic peptide
KQGSEKTNVDFEEV

SEQ ID NO: 1612 - protein, 14 aa, Artificial Sequence
  Synthetic peptide
KQGSEKTNVDSEEV

SEQ ID NO: 1613 - protein, 14 aa, Artificial Sequence
  Synthetic peptide
KQGSEKTNVDVEEV

SEQ ID NO: 1614 - protein, 14 aa, Artificial Sequence
  Synthetic peptide
KQGSDKTNVDDAGV

SEQ ID NO: 1615 - protein, 14 aa, Artificial Sequence
  Synthetic peptide
KQGSSKTNVDPREV

SEQ ID NO: 1616 - protein, 14 aa, Artificial Sequence
  Synthetic peptide
KQGSRKTNVDHKQV

SEQ ID NO: 1617 - protein, 14 aa, Artificial Sequence
  Synthetic peptide
KQGSKGGNVDTNRV

SEQ ID NO: 1618 - protein, 14 aa, Artificial Sequence
  Synthetic peptide
KQGSGEANVDNGDV

SEQ ID NO: 1619 - protein, 14 aa, Artificial Sequence
  Synthetic peptide
KQDAAADNIDYDHV

SEQ ID NO: 1620 - protein, 14 aa, Artificial Sequence
  Synthetic peptide
KQSGTRSNAAASSV

SEQ ID NO: 1621 - protein, 14 aa, Artificial Sequence
  Synthetic peptide
KENTNTNDTELTNV

SEQ ID NO: 1622 - protein, 14 aa, Artificial Sequence
  Synthetic peptide
QRGNNVAATADVNT

SEQ ID NO: 1623 - protein, 14 aa, Artificial Sequence
  Synthetic peptide
QRGNNEAATADVNT

SEQ ID NO: 1624 - protein, 14 aa, Artificial Sequence
  Synthetic peptide
QRGNNPAATADVNT

SEQ ID NO: 1625 - protein, 14 aa, Artificial Sequence
  Synthetic peptide
QRGNNHAATADVNT

SEQ ID NO: 1626 - protein, 14 aa, Artificial Sequence
  Synthetic peptide
QEENNIAATPGVNT

SEQ ID NO: 1627 - protein, 14 aa, Artificial Sequence
  Synthetic peptide
QPPNNMAATHEVNT

SEQ ID NO: 1628 - protein, 14 aa, Artificial Sequence
  Synthetic peptide
QHHNNSAATTIVNT

SEQ ID NO: 1629 - protein, 14 aa, Artificial Sequence
  Synthetic peptide
QTTNNRAAFNMVET

SEQ ID NO: 1630 - protein, 14 aa, Artificial Sequence
  Synthetic peptide
QKKNNNAASKKVAT

SEQ ID NO: 1631 - protein, 14 aa, Artificial Sequence
  Synthetic peptide
QGGNNKAADDAVKT

SEQ ID NO: 1632 - protein, 14 aa, Artificial Sequence
  Synthetic peptide
QAAKGGAADDAVKT

SEQ ID NO: 1633 - protein, 14 aa, Artificial Sequence
  Synthetic peptide
QDDRAAAANESVDT

SEQ ID NO: 1634 - protein, 14 aa, Artificial Sequence
  Synthetic peptide
QQQHDDAAYQRVHT

SEQ ID NO: 1635 - protein, 14 aa, Artificial Sequence
  Synthetic peptide
QSSSSLAAVSTVQT

SEQ ID NO: 1636 - protein, 14 aa, Artificial Sequence
  Synthetic peptide
QNNQTTAAIRNVTT

SEQ ID NO: 1637 - protein, 12 aa, Artificial Sequence
  Synthetic peptide
NYNKKSDNVDFT

SEQ ID NO: 1638 - protein, 12 aa, Artificial Sequence
  Synthetic peptide
NYNKKSENVDFT

SEQ ID NO: 1639 - protein, 12 aa, Artificial Sequence
  Synthetic peptide
NYNKKSLNVDFT

SEQ ID NO: 1640 - protein, 12 aa, Artificial Sequence
  Synthetic peptide
NYNKKSPNVDFT

SEQ ID NO: 1641 - protein, 12 aa, Artificial Sequence
  Synthetic peptide
NYSKKSHCVDFT

SEQ ID NO: 1642 - protein, 11 aa, Artificial Sequence
  Synthetic peptide
NYRKTIYVDFT

SEQ ID NO: 1643 - protein, 11 aa, Artificial Sequence
  Synthetic peptide
NYKEKKDVHFT

SEQ ID NO: 1644 - protein, 11 aa, Artificial Sequence
  Synthetic peptide
NYGHRAIVQFT

SEQ ID NO: 1645 - protein, 11 aa, Artificial Sequence
  Synthetic peptide
NYANHQFVVCT

SEQ ID NO: 1646 - protein, 12 aa, Artificial Sequence
  Synthetic peptide
NYDDDPTGVLLT

SEQ ID NO: 1647 - protein, 11 aa, Artificial Sequence
  Synthetic peptide"
NYDDPTGVLLT

SEQ ID NO: 1648 - protein, 11 aa, Artificial Sequence
  Synthetic peptide
NFEQQNSVEWT

SEQ ID NO: 1649 - protein, 7 aa, Artificial Sequence
  Synthetic peptide
SQSGASN

SEQ ID NO: 1650 - protein, 6 aa, Artificial Sequence
  Synthetic peptide
NNGSQA

SEQ ID NO: 1651 - protein, 25 aa, Artificial Sequence
  Synthetic peptide
YYLSRTNTPSGTTTWSRLQFSQAGA

SEQ ID NO: 1652 - protein, 16 aa, Artificial Sequence
  Synthetic peptide
SKTSADNNNSEYSWTG

SEQ ID NO: 1653 - protein, 8 aa, Artificial Sequence
  Synthetic peptide
HKDDEEKF

SEQ ID NO: 1654 - protein, 14 aa, Artificial Sequence
  Synthetic peptide
KQGSEKTNVDIEEV

SEQ ID NO: 1655 - protein, 14 aa, Artificial Sequence
  Synthetic peptide
QRGNNQAATADVNT

SEQ ID NO: 1656 - protein, 12 aa, Artificial Sequence
  Synthetic peptide
NYNKKSVNVDFT

SEQ ID NO: 1657 - protein, 42 aa, Artificial Sequence
  Synthetic polypeptide
SQSGASNYNTPSGTTTQSRLQFSTSADNNNSEYSWTGATKYH

SEQ ID NO: 1658 - protein, 42 aa, Artificial Sequence
  Synthetic polypeptide
SASGASNFNSEGGSLTQSSLGFSTDGENNNSDFSWTGATKYH

SEQ ID NO: 1659 - protein, 42 aa, Artificial Sequence
  Synthetic polypeptide
SQSGASNYNTPSGTTTQSRLQFSTDGENNNSDFSWTGATKYH

SEQ ID NO: 1660 - protein, 42 aa, Artificial Sequence
  Synthetic polypeptide
SASGASNYNTPSGTTTQSRLQFSTSADNNNSEFSWPGATTYH

SEQ ID NO: 1661 - protein, 42 aa, Artificial Sequence
  Synthetic polypeptide
SQSGASNFNSEGGSLTQSSLGFSTDGENNNSDFSWTGATKYH

SEQ ID NO: 1662 - protein, 42 aa, Artificial Sequence
  Synthetic polypeptide
SASGASNYNTPSGSLTQSSLGFSTDGENNNSDFSWTGATKYH

SEQ ID NO: 1663 - protein, 42 aa, Artificial Sequence
  Synthetic polypeptide
SQSGASNYNTPSGTTTQSRLQFSTSADNNNSDFSWTGATKYH

SEQ ID NO: 1664 - protein, 42 aa, Artificial Sequence
  Synthetic polypeptide
SGAGASNFNSEGGSLTQSSLGFSTDGENNNSDFSWTGATKYH

SEQ ID NO: 1665 - protein, 7 aa, Artificial Sequence
  Synthetic peptide
SGAGASN

SEQ ID NO: 1666 - protein, 15 aa, Artificial Sequence
  Synthetic peptide
NSEGGSLTQSSLGFS

SEQ ID NO: 1667 - protein, 11 aa, Artificial Sequence
  Synthetic peptide
TDGENNNSDFS

SEQ ID NO: 1668 - protein, 10 aa, Artificial Sequence
  Synthetic peptide
SEFSWPGATT

SEQ ID NO: 1669 - protein, 13 aa, Artificial Sequence
  Synthetic peptide
TSADNNNSDFSWT

SEQ ID NO: 1670 - protein, 8 aa, Artificial Sequence
  Synthetic peptide
SQSGASNY

SEQ ID NO: 1671 - protein, 15 aa, Artificial Sequence
  Synthetic peptide
NTPSGTTTQSRLQFS

SEQ ID NO: 1672 - protein, 19 aa, Artificial Sequence
  Synthetic peptide
TSADNNNSEYSWTGATKYH

SEQ ID NO: 1673 - protein, 8 aa, Artificial Sequence
  Synthetic peptide
SASGASNF

SEQ ID NO: 1674 - protein, 19 aa, Artificial Sequence
  Synthetic peptide
TDGENNNSDFSWTGATKYH

SEQ ID NO: 1675 - protein, 8 aa, Artificial Sequence
  Synthetic peptide
SASGASNY

SEQ ID NO: 1676 - protein, 19 aa, Artificial Sequence
  Synthetic peptide
TSADNNNSEFSWPGATTYH

SEQ ID NO: 1677 - protein, 15 aa, Artificial Sequence
  Synthetic peptide
NTPSGSLTQSSLGFS

SEQ ID NO: 1678 - protein, 19 aa, Artificial Sequence
  Synthetic peptide
TSADNNNSDFSWTGATKYH

SEQ ID NO: 1679 - protein, 8 aa, Artificial Sequence
  Synthetic peptide
SGAGASNF

SEQ ID NO: 1680 - protein, 48 aa, Artificial Sequence
  Synthetic polypeptide
CTCCAGVVSVVSMRSRVCVNSGCAGCTDHCVVSRNSGTCVMSACACAA

SEQ ID NO: 1681 - protein, 48 aa, Artificial Sequence
  Synthetic polypeptide
CTCCAGAGAGGCAACAGACAAGCAGCTACCGCAGATGTCAACACACAA

SEQ ID NO: 1682 - protein, 7 aa, Artificial Sequence
  Synthetic peptide
SAAGASN

SEQ ID NO: 1683 - protein, 24 aa, Artificial Sequence
  Synthetic peptide
YFLSRTNTESGSTTQSTLRFSQAG

SEQ ID NO: 1684 - protein, 13 aa, Artificial Sequence
  Synthetic peptide
SKTSADNNNSDFS

SEQ ID NO: 1685 - protein, 14 aa, Artificial Sequence
  Synthetic peptide
KQGSEKTDVDIDKV

SEQ ID NO: 1686 - protein, 7 aa, Artificial Sequence
  Synthetic peptide
STAGASN

SEQ ID NO: 1687 - protein, 24 aa, Artificial Sequence
  Synthetic peptide
YFLSRTNTTSGIETQSTLRFSQAG

SEQ ID NO: 1688 - protein, 13 aa, Artificial Sequence
  Synthetic peptide
SKTDGENNNSDFS

SEQ ID NO: 1689 - protein, 14 aa, Artificial Sequence
  Synthetic peptide
KQGAAADDVEIDGV

SEQ ID NO: 1690 - protein, 7 aa, Artificial Sequence
  Synthetic peptide
SEAGASN

SEQ ID NO: 1691 - protein, 24 aa, Artificial Sequence
  Synthetic peptide
YYLSRTNTPSGTTTQSRLQFSQAG

SEQ ID NO: 1692 - protein, 13 aa, Artificial Sequence
  Synthetic peptide
SKTSADNNNSEYS

SEQ ID NO: 1693 - protein, 14 aa, Artificial Sequence
  Synthetic peptide
KQGSEKTNVDIEKV

SEQ ID NO: 1694 - protein, 24 aa, Artificial Sequence
  Synthetic peptide
YFLSRTNDASGSDTKSTLLFSQAG

SEQ ID NO: 1695 - protein, 13 aa, Artificial Sequence
  Synthetic peptide
STTPSENNNSEYS

SEQ ID NO: 1696 - protein, 7 aa, Artificial Sequence
  Synthetic peptide
SAAGATN

SEQ ID NO: 1697 - protein, 24 aa, Artificial Sequence
  Synthetic peptide
YFLSRTNGEAGSATLSELRFSQAG

SEQ ID NO: 1698 - protein, 8 aa, Artificial Sequence
  Synthetic peptide
HGDDADRF

SEQ ID NO: 1699 - protein, 14 aa, Artificial Sequence
  Synthetic peptide
KQGAEKSDVEVDRV

SEQ ID NO: 1700 - protein, 14 aa, Artificial Sequence
  Synthetic peptide
KQDSGGDNIDIDQV

SEQ ID NO: 1701 - protein, 7 aa, Artificial Sequence
  Synthetic peptide
SDAGASN

SEQ ID NO: 1702 - protein, 24 aa, Artificial Sequence
  Synthetic peptide
YFLSRTNTEGGHDTQSTLRFSQAG

SEQ ID NO: 1703 - protein, 14 aa, Artificial Sequence
  Synthetic peptide
KEDGGGSDVAIDEV

SEQ ID NO: 1704 - protein, 7 aa, Artificial Sequence
  Synthetic peptide
SNAGASN

SEQ ID NO: 1705 - protein, 24 aa, Artificial Sequence
  Synthetic peptide
YFLSRTNGEAGSATLSELRFSQPG

SEQ ID NO: 1706 - DNA, 21 bp, Artificial Sequence
  Synthetic oligonucleotide
agcvvmdcaggarscascaac

SEQ ID NO: 1707 - DNA, 18 bp, Artificial Sequence
  Synthetic oligonucleotide
aacracrrsmrsmaggca

SEQ ID NO: 1708 - DNA, 24 bp, Artificial Sequence
  Synthetic oligonucleotide
cacrrggacrrcrmsrrsarsttt

SEQ ID NO: 1709 - DNA, 75 bp, Artificial Sequence
  Synthetic oligonucleotide
  modified_base (35)..(35): a, c, t, or g
  misc_feature (35)..(35): n is a, c, g, or t
tatttcttgagcagaacaaacrvcvvsrscggamncvhsacgmhstcavvscttvdsttttctcagsbcrgsgcg

SEQ ID NO: 1710 - DNA, 48 bp, Artificial Sequence
  Synthetic oligonucleotide
  modified_base (11)..(11): a, c, t, or g
  misc_feature (11)..(11): n is a, c, g, or t
tcaamammavnsrvcsrsaacaacaacagtrasttctcgtggmmagga

SEQ ID NO: 1711 - DNA, 42 bp, Artificial Sequence
  Synthetic oligonucleotide
  modified_base (31)..(31): a, c, t, or g
  misc_feature (31)..(31): n is a, c, g, or t
aagsaarrcrscrvsrvarvcratrycgmsnhcrvmvrsgtc

SEQ ID NO: 1712 - DNA, 42 bp, Artificial Sequence
  Synthetic oligonucleotide
  modified_base (17)..(17): a, c, t, or g
  misc_feature (17)..(17): n is a, c, g, or t
  modified_base (32)..(32): a, c, t, or g
  misc_feature (32)..(32): n is a, c, g, or t
cagvvsvvsmrsrvcvnsgcagctdhcvvsrnsgtcvmsaca

SEQ ID NO: 1713 - DNA, 33 bp, Artificial Sequence
  Synthetic oligonucleotide
aactwcrvsvasmvsvhsddtgtgswstksact

SEQ ID NO: 1714 - DNA, 30 bp, Artificial Sequence
  Synthetic oligonucleotide
ttgttgaacatcaccacgtgacgcacgttc

SEQ ID NO: 1715 - DNA, 30 bp, Artificial Sequence
  Synthetic oligonucleotide
tccccgtggttctactacataatgtggccg

SEQ ID NO: 1716 - DNA, 30 bp, Artificial Sequence
  Synthetic oligonucleotide
ttccacactccgttttggataatgttgaac

SEQ ID NO: 1717 - DNA, 30 bp, Artificial Sequence
  Synthetic oligonucleotide
agggacatccccagctccatgctgtggtcg

SEQ ID NO: 1718 - DNA, 30 bp, Artificial Sequence
  Synthetic oligonucleotide
agggacaacccctccgactcgccctaatcc

SEQ ID NO: 1719 - DNA, 30 bp, Artificial Sequence
  Synthetic oligonucleotide
tcctagtagaagacaccctctcactgcccg

SEQ ID NO: 1720 - DNA, 30 bp, Artificial Sequence
  Synthetic oligonucleotide
agtaccatgtacacccactctcccagtgcc

SEQ ID NO: 1721 - DNA, 30 bp, Artificial Sequence
  Synthetic oligonucleotide
atatggacgttcatgctgatcaccataccg

SEQ ID NO: 1722 - DNA, 30 bp, Artificial Sequence
  Synthetic oligonucleotide
agcaggagctccttggcctcagcgtgcgag

SEQ ID NO: 1723 - DNA, 30 bp, Artificial Sequence
  Synthetic oligonucleotide
acaagcagcttcactatgacaaccactgac

SEQ ID NO: 1724 - DNA, 284 bp, Artificial Sequence
  Synthetic polynucleotide
  modified_base (59)..(59): a, c, t, or g
  misc_feature (59)..(59): n is a, c, g, or t
  modified_base (244)..(244): a, c, t, or g
  misc_feature (244)..(244): n is a, c, g, or t
cagcctaggaactggcttcctggaccctgttaccgccagcagagagtctcaamammavnsrvcsrsaacaacaacagtrasttctcctggmmaggagctaccaagtaccacctcaatggcagagactctctggtgaatcccggaccagctatggcaagccacrrggacrrcrmsrrsarsttttttcctcagagcggggttctcatctttgggaagsaarrcrscrvsrvarvcratrycgmsnhcrvmvrsgtcatgattacagacgaagaggagatctggac

SEQ ID NO: 1725 - DNA, 34 bp, Artificial Sequence
  Synthetic oligonucleotide
tgggacaatggcggtcgtctctcagagttktkkt

SEQ ID NO: 1726 - DNA, 35 bp, Artificial Sequence
  Synthetic oligonucleotide
agaggacckktcctcgatggttcatggtggagtta

SEQ ID NO: 1727 - DNA, 31 bp, Artificial Sequence
  Synthetic oligonucleotide
ccacttagggcctggtcgataccgttcggtg

SEQ ID NO: 1728 - DNA, 32 bp, Artificial Sequence
  Synthetic oligonucleotide
tctcgccccaagagtagaaacccttcsttyyg

SEQ ID NO: 1729 - protein, 735 aa, Adeno-associated virus 2 [sequence omitted]

SEQ ID NO: 1730 - protein, 736 aa, Adeno-associated virus 9; identical to SEQ ID NO: 128

SEQ ID NO: 1731 - protein, 7 aa, Artificial Sequence
  Synthetic peptide
GSTPPPM

SEQ ID NO: 1732 - protein, 7 aa, Artificial Sequence
  Synthetic peptide
GETRAPL

SEQ ID NO: 1733 - protein, 6 aa, Artificial Sequence
  Synthetic peptide
SPAKFA

SEQ ID NO: 1734 - protein, 6 aa, Artificial Sequence
  Synthetic peptide
NKDKLN

SEQ ID NO: 1735 - DNA, 26 bp, Artificial Sequence
  Synthetic oligonucleotide
taactataacggtcctaaggtagcga

SEQ ID NO: 1736 - DNA, 43 bp, Artificial Sequence
  Synthetic oligonucleotide
atacgactcgacgaagacttgatcaaccgtcggctttatggct

SEQ ID NO: 1737 - DNA, 43 bp, Artificial Sequence
  Synthetic oligonucleotide
atacgactcgacgaagacttgatcaaccatcggctttatggct

SEQ ID NO: 1738 - DNA, 43 bp, Artificial Sequence
  Synthetic oligonucleotide
atacgactcgacgaagacttgatcaaccgtaggctttatggct

SEQ ID NO: 1739 - DNA, 43 bp, Artificial Sequence
  Synthetic oligonucleotide
atacgactcgacgaagacttgatcctgactcggctttatggct

SEQ ID NO: 1740 - DNA, 43 bp, Artificial Sequence
  Synthetic oligonucleotide
atacgactcgacgaagacttagttaaccgtcggctttatggct

SEQ ID NO: 1741 - DNA, 43 bp, Artificial Sequence
  Synthetic oligonucleotide
atacgactcgacgaagacttagttaaccgtccgctttatggct

SEQ ID NO: 1742 - DNA, 43 bp, Artificial Sequence
  Synthetic oligonucleotide
atacgactcgacgaagacttagttaactgtccgctttatggct

SEQ ID NO: 1743 - DNA, 43 bp, Artificial Sequence
  Synthetic oligonucleotide
atacgactcgacgaagacctgccatctaaggcagtttatggct

SEQ ID NO: 1744 - DNA, 43 bp, Artificial Sequence
  Synthetic oligonucleotide
atacgactctgccagctcatctaagagctggcagtttatggct

SEQ ID NO: 1745 - DNA, 43 bp, Artificial Sequence
  Synthetic oligonucleotide
atacgactctgcctgctcatctaagagctggcagtttatggct

SEQ ID NO: 1746 - DNA, 47 bp, Artificial Sequence
  Synthetic oligonucleotide
atacctgccagctcttcgatctaacgaagagctggcagtttatggct

SEQ ID NO: 1747 - DNA, 47 bp, Artificial Sequence
  Synthetic oligonucleotide
atacctgcctgctcttcgatctaacgaagagctggcagtttatggct

SEQ ID NO: 1748 - DNA, 47 bp, Artificial Sequence
  Synthetic oligonucleotide
atacctgcctgctcatcgatctaacgaagagctggcagtttatggct

SEQ ID NO: 1749 - DNA, 43 bp, Artificial Sequence
  Synthetic oligonucleotide
atacctgccatctaaggcaggactcgacgaagactttatggct

SEQ ID NO: 1750 - DNA, 43 bp, Artificial Sequence
  Synthetic oligonucleotide
atacctgccagctcatctaagagctggcaggacttttatggct

SEQ ID NO: 1751 - DNA, 43 bp, Artificial Sequence
  Synthetic oligonucleotide
atacctgcctgctcatctaagagctggcaggacttttatggct

SEQ ID NO: 1752 - DNA, 24 bp, Artificial Sequence
  Synthetic oligonucleotide
atacgactcgacgaagacttgatc

SEQ ID NO: 1753 - DNA, 30 bp, Artificial Sequence
  Synthetic oligonucleotide
atacgactcgacgaagacttgatcctgact

SEQ ID NO: 1754 - DNA, 20 bp, Artificial Sequence
  Synthetic oligonucleotide
atacgactcgacgaagactt

SEQ ID NO: 1755 - DNA, 18 bp, Artificial Sequence
  Synthetic oligonucleotide
atacgactcgacgaagac

SEQ ID NO: 1756 - DNA, 10 bp, Artificial Sequence
  Synthetic oligonucleotide
aaccgtcggc

SEQ ID NO: 1757 - DNA, 10 bp, Artificial Sequence
  Synthetic oligonucleotide
aaccatcggc

SEQ ID NO: 1758 - DNA, 10 bp, Artificial Sequence
  Synthetic oligonucleotide
aaccgtaggc

SEQ ID NO: 1759 - DNA, 14 bp, Artificial Sequence
  Synthetic oligonucleotide
agttaaccgtcggc

SEQ ID NO: 1760 - DNA, 14 bp, Artificial Sequence
  Synthetic oligonucleotide
agttaaccgtccgc

SEQ ID NO: 1761 - DNA, 14 bp, Artificial Sequence
  Synthetic oligonucleotide
agttaactgtccgc

SEQ ID NO: 1762 - DNA, 10 bp, Artificial Sequence
  Synthetic oligonucleotide
ctgccagctc

SEQ ID NO: 1763 - DNA, 10 bp, Artificial Sequence
  Synthetic oligonucleotide
ctgcctgctc

SEQ ID NO: 1764 - DNA, 14 bp, Artificial Sequence
  Synthetic oligonucleotide
ctgccagctcttcg

SEQ ID NO: 1765 - DNA, 14 bp, Artificial Sequence
  Synthetic oligonucleotide
ctgcctgctcttcg

SEQ ID NO: 1766 - DNA, 14 bp, Artificial Sequence
  Synthetic oligonucleotide
ctgcctgctcatcg

SEQ ID NO: 1767 - DNA, 10 bp, Artificial Sequence
  Synthetic oligonucleotide
gagctggcag

SEQ ID NO: 1768 - DNA, 14 bp, Artificial Sequence
  Synthetic oligonucleotide
cgaagagctggcag

SEQ ID NO: 1769 - DNA, 23 bp, Artificial Sequence
  Synthetic oligonucleotide
gactcgacgaagactttatggct

SEQ ID NO: 1770 - DNA, 13 bp, Artificial Sequence
  Synthetic oligonucleotide
gacttttatggct

SEQ ID NO: 1771 - DNA, 11 bp, Artificial Sequence
  Synthetic oligonucleotide
  misc_feature (1)..(11): /note="Variant nucleotides given in the sequence have no preference with respect to those in the annotations for variant positions"
  Variation (7)..(9): /replace="act" or "acg" or "ctg" or "gtg" or "ttg"
gccrccatggc

SEQ ID NO: 1772 - DNA, 11 bp, Artificial Sequence
  Synthetic oligonucleotide
tttagatggct

SEQ ID NO: 1773 - DNA, 11 bp, Artificial Sequence
  Synthetic oligonucleotide
tttagatgttg

SEQ ID NO: 1774 - DNA, 11 bp, Artificial Sequence
  Synthetic oligonucleotide
tttttatgttg

SEQ ID NO: 1775 - protein, 743 aa, Artificial Sequence
  Synthetic polypeptide
MAADGYLPDWLEDNLSEGIREWWALKPGAPQPKANQQHQDNARGLVLPGYKYLGPGNGLDKGEPVNAADAAALEHDKAYDQQLKAGDNPYLKYNHADAEFQERLKEDTSFGGNLGRAVFQAKKRLLEPLGLVEEAAKTAPGKKRPVEQSPQEPDSSAGIGKSGAQPAKKRLNFGQTGDTESVPDPQPIGEPPAAPSGVGSLTMASGGGAPVADNNEGADGVGSSSGNWHCDSQWLGDRVITTSTRTWALPTYNNHLYKQISNSTSGGSSNDNAYFGYSTPWGYFDFNRFHCHFSPRDWQRLINNNWGFRPKRLNFKLFNIQVKEVTDNNGVKTIANNLTSTVQVFTDSDYQLPYVLGSAHEGCLPPFPADVFMIPQYGYLTLNDGSQAVGRSSFYCLEYFPSQMLRTGNNFQFSYEFENVPFHSSYAHSQSLDRLMNPLIDQYLYYLSKTINGSGQNQQTLKFSVAGPSNMAVQGRNYIPGPSYRQQRVSTTVTQNNNSEFAWPGASSWALNGRNSLMNPGPAMASHKEGEDRFFPLSGSLIFGKQGTGRDNVDADKVMITNEEEIKTTNPVATESYGQVATNHQSDGTLAVPFKAQAQTGWVQNQGILPGMVWQDRDVYLQGPIWAKIPHTDGNFHPSPLMGGFGMKHPPPQILIKNTPVPADPPTAFNKDKLNSFITQYSTGQVSVEIEWELQKENSKRWNPEIQYTSNYYKSNNVEFAVNTEGVYSEPRPIGTRYLTRNL

SEQ ID NO: 1776 - DNA, 2232 bp, Artificial Sequence
  Synthetic polynucleotide
atggctgccgatggttatcttccagattggctcgaggacaaccttagtgaaggaattcgcgagtggtgggctttgaaacctggagcccctcaacccaaggcaaatcaacaacatcaagacaacgctcgaggtcttgtgcttccgggttacaaataccttggacccggcaacggactcgacaagggggagccggtcaacgcagcagacgcggcggccctcgagcacgacaaggcctacgaccagcagctcaaggccggagacaacccgtacctcaagtacaaccacgccgacgccgagttccaggagcggctcaaagaagatacgtcttttgggggcaacctcgggcgagcagtcttccaggccaaaaagaggcttcttgaacctcttggtctggttgaggaagcggctaagacggctcctggaaagaagaggcctgtagagcagtctcctcaggaaccggactcctccgcgggtattggcaaatcgggtgcacagcccgctaaaaagagactcaatttcggtcagactggcgacacagagtcagtcccagaccctcaaccaatcggagaacctcccgcagccccctcaggtgtgggatctcttacaatggcttcaggtggtggcgcaccagtggcagacaataacgaaggtgccgatggagtgggtagttcctcgggaaattggcattgcgattcccaatggctgggggacagagtcatcaccaccagcacccgaacctgggccctgcccacctacaacaatcacctctacaagcaaatctccaacagcacatctggaggatcttcaaatgacaacgcctacttcggctacagcaccccctgggggtattttgacttcaacagattccactgccacttctcaccacgtgactggcagcgactcatcaacaacaactggggattccggcctaagcgactcaacttcaagctcttcaacattcaggtcaaagaggttacggacaacaatggagtcaagaccatcgccaataaccttaccagcacggtccaggtcttcacggactcagactatcagctcccgtacgtgctcgggtcggctcacgagggctgcctcccgccgttcccagcggacgttttcatgattcctcagtacgggtatctgacgcttaatgatggaagccaggccgtgggtcgttcgtccttttactgcctggaatatttcccgtcgcaaatgctaagaacgggtaacaacttccagttcagctacgagtttgagaacgtacctttccatagcagctacgctcacagccaaagcctggaccgactaatgaatccactcatcgaccaatacttgtactatctctcaaagactattaacggttctggacagaatcaacaaacgctaaaattcagtgtggccggacccagcaacatggctgtccagggaagaaactacatacctggacccagctaccgacaacaacgtgtctcaaccactgtgactcaaaacaacaacagcgaatttgcttggcctggagcttcttcttgggctctcaatggacgtaatagcttgatgaatcctggacctgctatggccagccacaaagaaggagaggaccgtttctttcctttgtctggatctttaatttttggcaaacaaggaactggaagagacaacgtggatgcggacaaagtcatgataaccaacgaagaagaaattaaaactactaacccggtagcaacggagtcctatggacaagtggccacaaaccaccagagtgatgggactttggcggtgccttttaaggcacaggcgcagaccggctgggttcaaaaccaaggaatacttccgggtatggtttggcaggacagagatgtgtacctgcaaggacccatttgggccaaaattcctcacacggacggcaactttcacccttctccgctgatgggagggtttggaatgaagcacccgcctcctcagatcctcatcaaaaacacacctgtacctgcggatcctccaacggccttcaacaaggacaagctgaactctttcatcacccagtattctactggccaagtcagcgtggagatcgagtgggagctgcagaaggaaaacagcaagcgctggaacccggagatccagtacacttccaactattacaagtctaataatgttgaatttgctgttaatactgaaggtgtatatagtgaaccccgccccattggcaccagatacctgactcgtaatctgtaa

SEQ ID NO: 1777 - DNA, 2232 bp, Artificial Sequence
  Synthetic polynucleotide
atggctgccgatggttatcttccagattggctcgaggacaaccttagtgaaggaattcgcgagtggtgggctttgaaacctggagcccctcaacccaaggcaaatcaacaacatcaagacaacgctcgaggtcttgtgcttccgggttacaaataccttggacccggcaacggactcgacaagggggagccggtcaacgcagcagacgcggcggccctcgagcacgacaaggcctacgaccagcagctcaaggccggagacaacccgtacctcaagtacaaccacgccgacgccgagttccaggagcggctcaaagaagatacgtcttttgggggcaacctcgggcgagcagtcttccaggccaaaaagaggcttcttgaacctcttggtctggttgaggaagcggctaagacggctcctggaaagaagaggcctgtagagcagtctcctcaggaaccggactcctccgcgggtattggcaaatcgggtgcacagcccgctaaaaagagactcaatttcggtcagactggcgacacagagtcagtcccagaccctcaaccaatcggagaacctcccgcagccccctcaggtgtgggatctcttacaatggcttcaggtggtggcgcaccagtggcagacaataacgaaggtgccgatggagtgggtagttcctcgggaaattggcattgcgattcccaatggctgggggacagagtcatcaccaccagcacccgaacctgggccctgcccacctacaacaatcacctctacaagcaaatctccaacagcacatctggaggatcttcaaatgacaacgcctacttcggctacagcaccccctgggggtattttgacttcaacagattccactgccacttctcaccacgtgactggcagcgactcatcaacaacaactggggattccggcctaagcgactcaacttcaagctcttcaacattcaggtcaaagaggttacggacaacaatggagtcaagaccatcgccaataaccttaccagcacggtccaggtcttcacggactcagactatcagctcccgtacgtgctcgggtcggctcacgagggctgcctcccgccgttcccagcggacgttttcatgattcctcagtacgggtatctgacgcttaatgatggaagccaggccgtgggtcgttcgtccttttactgcctggaatatttcccgtcgcaaatgctaagaacgggtaacaacttccagttcagctacgagtttgagaacgtacctttccatagcagctacgctcacagccaaagcctggaccgactaatgaatccactcatcgaccaatacttgtactatctctcaaagactattaacggttctggacagaatcaacaaacgctaaaattcagtgtggccggacccagcaacatggctgtccagggaagaaactacatacctggacccagctaccgacaacaacgtgtctcaaccactgtgactcaaaacaacaacagcgaatttgcttggcctggagcttcttcttgggctctcaatggacgtaatagcttgatgaatcctggacctgctatggccagccacaaagaaggagaggaccgtttctttcctttgtctggatctttaatttttggcaaacaaggaactggaagagacaacgtggatgcggacaaagtcatgataaccaacgaagaagaaattaaaactactaacccggtagcaacggagtcctatggacaagtggccacaaaccaccagagtgcccaaactttggcggtgccttttaaggcacaggcgcagaccggctgggttcaaaaccaaggaatacttccgggtatggtttggcaggacagagatgtgtacctgcaaggacccatttgggccaaaattcctcacacggacggcaactttcacccttctccgctgatgggagggtttggaatgaagcacccgcctcctcagatcctcatcaaaaacacacctgtacctgcggatcctccaacggccttcaacaaggacaagctgaactctttcatcacccagtattctactggccaagtcagcgtggagatcgagtgggagctgcagaaggaaaacagcaagcgctggaacccggagatccagtacacttccaactattacaagtctaataatgttgaatttgctgttaatactgaaggtgtatatagtgaaccccgccccattggcaccagatacctgactcgtaatctgtaa

SEQ ID NO: 1778 - DNA, 2208 bp, Artificial Sequence
  Synthetic polynucleotide
ctggctgccgacggttatctacccgattggctcgaggacactctctctgaaggaataagacagtggtggaagctcaaacctggcccaccaccaccaaagcccgcagagcggcataaggacgacagcaggggtcttgtgcttcctgggtacaagtacctcggacccttcaacggactcgacaagggagagccggtcaacgaggcagacgccgcggccctcgagcacgacaaagcctacgaccggcagctcgacagcggagacaacccgtacctcaagtacaaccacgccgacgcggagtttcaggagcgccttaaagaagatacctcttttgggggcaacctcggacgagcagtcttccaggcgaaaaagagggttcttgaacctctgggcctggttgaggaacctgttaagacggctccgggaaaaaagaggccggtagagcactctcctgtggagccagactcctcctcgggaaccggaaaggcgggccagcagcctgcaagaaaaagattgaattttggtcagactggagacgcagactcagtacctgacccccagcctctcggacagccaccagcagccccctctggtctgggaactaatacgatggctacaggcagtggcgcaccaatggcagacaataacgagggcgccgacggagtgggtaattcctcgggaaattggcattgcgattccacatggatgggcgacagagtcatcaccaccagcacccgaacctgggccctgcccacctacaacaaccacctctacaaacaaatttccagccaatcaggagcctcgaacgacaatcactactttggctacagcaccccttgggggtattttgacttcaacagattccactgccacttttcaccacgtgactggcaaagactcatcaacaacaactggggattccgacccaagagactcaacttcaagctctttaacattcaagtcaaagaggtcacgcagaatgacggtacgacgacgattgccaataaccttaccagcacggttcaggtgtttactgactcggagtaccagctcccgtacgtcctcggctcggcgcatcaaggatgcctcccgccgttcccagcagacgtcttcatggtgccacagtatggatacctcaccctgaacaacgggagtcaggcagtaggacgctcttcattttactgcctggagtactttccttctcagatgctgcgtaccggaaacaactttaccttcagctacacttttgaggacgttcctttccacagcagctacgctcacagccagagtctggaccgtctcatgaatcctctcatcgaccagtacctgtattacttgagcagaacaaacactccaagtggaaccaccacgcagtcaaggcttcagttttctcaggccggagcgagtgacattcgggaccagtctaggaactggcttcctggaccctgttaccgccagcagcgagtatcaaagacatctgcggataacaacaacagtgaatactcgtggactggagctaccaagtaccacctcaatggcagagactctctggtgaatccgggcccggccatggcaagccacaaggacgatgaagaaaagttttttcctcagagcggggttctcatctttgggaagcaaggctcagagaaaacaaatgtggacattgaaaaggtcatgattacagacgaagaggaaatcaggacaaccaatcccgtggctacggagcagtatggttctgtatctaccaacctccagagaggcaacagacaagcagctaccgcagatgtcaacacacaaggcgttcttccaggcatggtctggcaggacagagatgtgtaccttcaggggcccatctgggcaaagattccacacacggacggacattttcacccctctcccctcatgggtggattcggacttaaacaccctcctccacagattctcatcaagaacaccccggtacctgcgaatccttcgaccaccttcagtgcggcaaagtttgcttccttcatcacacagtactccacgggacaggtcagcgtggagatcgagtgggagctgcagaaggaaaacagcaaacgctggaatcccgaaattcagtacacttccaactacaacaagtctgttaatgtggactttactgtggacactaatggcgtgtattcagagcctcgccccattggcaccagatacctgactcgtaatctgtaa

SEQ ID NO: 1779 - DNA, 1866 bp, Artificial Sequence
  Synthetic polynucleotide
ctggcggggttttacgagattgtgattaaggtccccagcgaccttgacgagcatctgcccggcatttctgacagctttgtgaactgggtggccgagaaggagtgggagttgccgccagattctgacttggatctgaatctgattgagcaggcacccctgaccgtggccgagaagctgcagcgcgactttctgacggagtggcgccgtgtgagtaaggccccggaggcccttttctttgtgcaatttgagaagggagagagctacttccacttacacgtgctcgtggaaaccaccggggtgaaatccttagttttgggacgtttcctgagtcagattcgcgaaaaactgattcagagaatttaccgcgggatcgagccgactttgccaaactggttcgcggtcacaaagaccagaaacggcgccggaggcgggaacaaggtggtggacgagtgctacatccccaattacttgctccccaaaacccagcctgagctccagtgggcgtggactaatttagaacagtatttaagcgcctgtttgaatctcacggagcgtaaacggttggtggcgcagcatctgacgcacgtgtcgcagacgcaggagcagaacaaagagaatcagaatcccaattctgacgcgccggtgatcagatcaaaaacttcagccaggtacatggagctggtcgggtggctcgtggacaaggggattacctcggagaagcagtggatccaggaggaccaggcctcatacatctccttcaatgcggcctccaactcgcggtcccaaatcaaggctgccttggacaatgcgggaaagattatgagcctgactaaaaccgcccccgactacctggtgggccagcagcccgtggaggacatttccagcaatcggatttataaaattttggaactaaacgggtacgatccccaatatgcggcttccgtctttctgggatgggccacgaaaaagttcggcaagaggaacaccatctggctgtttgggcctgcaactaccgggaagaccaacatcgcggaggccatagcccacactgtgcccttctacgggtgcgtaaactggaccaatgagaactttcccttcaacgactgtgtcgacaagatggtgatctggtgggaggaggggaagatgaccgccaaggtcgtggagtcggccaaagccattctcggaggaagcaaggtgcgcgtggaccagaaatgcaagtcctcggcccagatagacccgactcccgtgatcgtcacctccaacaccaacatgtgcgccgtgattgacgggaactcaacgaccttcgaacaccagcagccgttgcaagaccggatgttcaaatttgaactcacccgccgtctggatcatgactttgggaaggtcaccaagcaggaagtcaaagactttttccggtgggcaaaggatcacgtggttgaggtggagcatgaattctacgtcaaaaagggtggagccaagaaaagacccgcccccagtgacgcagatataagtgagcccaaacgggtgcgcgagtcagttgcgcagccatcgacgtcagacgcggaagcttcgatcaactacgcagacaggtaccaaaacaaatgttctcgtcacgtgggcatgaatctgatgctgtttccctgcagacaatgcgagagaatgaatcagaattcaaatatctgcttcactcacggacagaaagactgtttagagtgctttcccgtgtcagaatctcaacccgtttctgtcgtcaaaaaggcgtatcagaaactgtgctacattcatcatatcatgggaaaggtgccagacgcttgcactgcctgcgatctggtcaatgtggatttggatgactgcatctttgaacaataa

SEQ ID NO: 1780 - protein, 621 aa, Artificial Sequence
  Synthetic polypeptide
LAGFYEIVIKVPSDLDEHLPGISDSFVNWVAEKEWELPPDSDLDLNLIEQAPLTVAEKLQRDFLTEWRRVSKAPEALFFVQFEKGESYFHLHVLVETTGVKSLVLGRFLSQIREKLIQRIYRGIEPTLPNWFAVTKTRNGAGGGNKVVDECYIPNYLLPKTQPELQWAWTNLEQYLSACLNLTERKRLVAQHLTHVSQTQEQNKENQNPNSDAPVIRSKTSARYMELVGWLVDKGITSEKQWIQEDQASYISFNAASNSRSQIKAALDNAGKIMSLTKTAPDYLVGQQPVEDISSNRIYKILELNGYDPQYAASVFLGWATKKFGKRNTIWLFGPATTGKTNIAEAIAHTVPFYGCVNWTNENFPFNDCVDKMVIWWEEGKMTAKVVESAKAILGGSKVRVDQKCKSSAQIDPTPVIVTSNTNMCAVIDGNSTTFEHQQPLQDRMFKFELTRRLDHDFGKVTKQEVKDFFRWAKDHVVEVEHEFYVKKGGAKKRPAPSDADISEPKRVRESVAQPSTSDAEASINYADRYQNKCSRHVGMNLMLFPCRQCERMNQNSNICFTHGQKDCLECFPVSESQPVSVVKKAYQKLCYIHHIMGKVPDACTACDLVNVDLDDCIFEQ

SEQ ID NO: 1781 - DNA, 9319 bp, Artificial Sequence
  Synthetic polynucleotide
gacgaaagggcctcgtgatacgcctatttttataggttaatgtcatgataataatggtttcttagacgtcaggtggcacttttcggggaaatgtgcgcggaacccctatttgtttatttttctaaatacattcaaatatgtatccgctcatgagacaataaccctgataaatgcttcaataatattgaaaaaggaagagtatgagtattcaacatttccgtgtcgcccttattcccttttttgcggcattttgccttcctgtttttgctcacccagaaacgctggtgaaagtaaaagatgctgaagatcagttgggtgcacgagtgggttacatcgaactggatctcaacagcggtaagatccttgagagttttcgccccgaagaacgttttccaatgatgagcacttttaaagttctgctatgtggcgcggtattatcccgtattgacgccgggcaagagcaactcggtcgccgcatacactattctcagaatgacttggttgagtactcaccagtcacagaaaagcatcttacggatggcatgacagtaagagaattatgcagtgctgccataaccatgagtgataacactgcggccaacttacttctgacaacgatcggaggaccgaaggagctaaccgcttttttgcacaacatgggggatcatgtaactcgccttgatcgttgggaaccggagctgaatgaagccataccaaacgacgagcgtgacaccacgatgcctgtagcaatggcaacaacgttgcgcaaactattaactggcgaactacttactctagcttcccggcaacaattaatagactggatggaggcggataaagttgcaggaccacttctgcgctcggcccttccggctggctggtttattgctgataaatctggagccggtgagcgtgggtctcgcggtatcattgcagcactggggccagatggtaagccctcccgtatcgtagttatctacacgacggggagtcaggcaactatggatgaacgaaatagacagatcgctgagataggtgcctcactgattaagcattggtaactgtcagaccaagtttactcatatatactttagattgatttaaaacttcatttttaatttaaaaggatctaggtgaagatcctttttgataatctcatgaccaaaatcccttaacgtgagttttcgttccactgagcgtcagaccccgtagaaaagatcaaaggatcttcttgagatcctttttttctgcgcgtaatctgctgcttgcaaacaaaaaaaccaccgctaccagcggtggtttgtttgccggatcaagagctaccaactctttttccgaaggtaactggcttcagcagagcgcagataccaaatactgttcttctagtgtagccgtagttaggccaccacttcaagaactctgtagcaccgcctacatacctcgctctgctaatcctgttaccagtggctgctgccagtggcgataagtcgtgtcttaccgggttggactcaagacgatagttaccggataaggcgcagcggtcgggctgaacggggggttcgtgcacacagcccagcttggagcgaacgacctacaccgaactgagatacctacagcgtgagctatgagaaagcgccacgcttcccgaagggagaaaggcggacaggtatccggtaagcggcagggtcggaacaggagagcgcacgagggagcttccagggggaaacgcctggtatctttatagtcctgtcgggtttcgccacctctgacttgagcgtcgatttttgtgatgctcgtcaggggggcggagcctatggaaaaacgccagcaacgcggcctttttacggttcctggccttttgctggccttttgctcacatgttctttcctgcgttatcccctgattctgtggataaccgtattaccgcctttgagtgagctgataccgctcgccgcagccgaacgaccgagcgcagcgagtcagtgagcgaggaagcggaagagcgcccaatacgcaaaccgcctctccccgcgcgttggccgattcattaatgcagctggcacgacaggtttcccgactggaaagcgggcagtgagcgcaacgcaattaatgtgagttagctcactcattaggcaccccaggctttacactttatgcttccggctcgtatgttgtgtggaattgtgagcggataacaatttcacacaggaaacagctatgaccatgattacgccaagcttgcatgcaggcctctgcagtcgacaccggttaagcgggtgtgggcggacaataaagtcttaaactgaacaaaatagatctaaactatgacaataaagtcttaaactagacagaatagttgtaaactgaaatcagtccagttatgctgtgaaaaagcatactggacttttgttatggctaaagcaaactcttcattttctgaagtgcaaattgcccgtcgtattaaagaggggcgtggccaagggcatggtaaagactatattcgcggcgttgtgacaatttaccgaacaactccgcggccgggaagccgatctcggcttgaacgaattgttaggtggcggtacttgggtcgatatcaaagtgcatcacttcttcccgtatgcccaactttgtatagagagccactgcgggatcgtcaccgtaatctgcttgcacgtagatcacataagcaccaagcgcgttggcctcatgcttgaggagattgatgagcgcggtggcaatgccctgcctccggtgctcgccggagactgcgagatcatagatatagatctcactacgcggctgctcaaacttgggcagaacgtaagccgcgagagcgccaacaaccgcttcttggtcgaaggcagcaagcgcgatgaatgtcttactacggagcaagttcccgaggtaatcggagtccggctgatgttgggagtaggtggctacgtctccgaactcacgaccgaaaagatcaagagcagcccgcatggatttgacttggtcagggccgagcctacatgtgcgaatgatgcccatacttgagccacctaactttgttttagggcgactgccctgctgcgtaacatcgttgctgctgcgtaacatcgttgctgctccataacatcaaacatcgacccacggcgtaacgcgcttgctgcttggatgcccgaggcatagactgtacaaaaaaacagtcataacaagccatgaaaaccgccactgcgccgttaccaccgctgcgttcggtcaaggttctggaccagttgcgtgagcgcatacgctacttgcattacagtttacgaaccgaacaggcttatgtcaactgggttcgtgccttcatccgtttccacggtgtgcgtcacccggcaaccttgggcagcagcgaagtcgaggcatttctgtcctggctggcgaacgagcgcaaggtttcggtctccacgcatcgtcaggcattggcggccttgctgttcttctacggcaaggtgctgtgcacggatctgcccttgcttcaggagatcggtagacctcggccgtcgcggcgcttgccggtggtgctgaccccggatgaagtggttcgcatcctcggttttctggaaggcgagcatcgtttgttcgcccaggactctagctatagttctagtggttggctacgtacccgtagtggctatggcagggcttgccgccccgacgttggctgcgagccctgggccttcacccgaacttgggggttggggtggggaaaaggaagaaacgcgggcgtattggtcccaatggggtctcggtggggtatcgacagagtgccagccctgggaccgaaccccgcgtttatgaacaaacgacccaacacccgtgcgttttattctgtctttttattgccgtcatagcgcgggttccttccggtattgtctccttccgtgtttcagttagcctcccccatctcccggtaccgcatgctatgcatcagctgctagcttacagattacgagtcaggtatctggtgccaatggggcgaggctctgaatacacgccattagtgtccacagtaaagtccacattaacagacttgttgtagttggaagtgtactgaatttcgggattccagcgtttgctgttttccttctgcagctcccactcgatctccacgctgacctgtcccgtggagtactgtgtgatgaaggaagcaaactttgccgcactgaaggtggtcgaaggattcgcaggtaccggggtgttcttgatgagaatctgtggaggagggtgtttaagtccgaatccacccatgaggggagaggggtgaaaatgtccgtccgtgtgtggaatctttgcccagatgggcccctgaaggtacacatctctgtcctgccagaccatgcctggaagaacgccttgtgtgttgacatctgcggtagctgcttgtctgttgcctctctggaggttggtagatacagaaccatactgctccgtagccacgggattggttgtcctgatttcctcttcgtctgtaatcatgaccttttcaatgtccacatttgttttctctgagccttgcttcccaaagatgagaaccccgctctgaggaaaaaacttttcttcatcgtccttgtggcttgccatggccgggcccggattcaccagagagtctctgccattgaggtggtacttggtagctccagtccacgagtattcactgttgttgttatccgcagatgtctttgatactcgctgctggcggtaacagggtccaggaagccagttcctagactggtcccgaatgtcactcgctccggcctgagaaaactgaagccttgactgcgtggtggttccacttggagtgtttgttctgctcaagtaatacaggtactggtcgatgagaggattcatgagacggtccagactctggctgtgagcgtagctgctgtggaaaggaacgtcctcaaaagtgtagctgaaggtaaagttgtttccggtacgcagcatctgagaaggaaagtactccaggcagtaaaatgaagagcgtcctactgcctgactcccgttgttcagggtgaggtatccatactgtggcaccatgaagacgtctgctgggaacggcgggaggcatccttgatgcgccgagccgaggacgtacgggagctggtactccgagtcagtaaacacctgaaccgtgctggtaaggttattggcaatcgtcgtcgtaccgtcattctgcgtgacctctttgacttgaatgttaaagagcttgaagttgagtctcttgggtcggaatccccagttgttgttgatgagtctttgccagtcacgtggtgaaaagtggcagtggaatctgttgaagtcaaaatacccccaaggggtgctgtagccaaagtagtgattgtcgttcgaggctcctgattggctggaaatttgtttgtagaggtggttgttgtaggtgggcagggcccaggttcgggtgctggtggtgatgactctgtcgcccatccatgtggaatcgcaatgccaatttcccgaggaattacccactccgtcggcgccctcgttattgtctgccattggtgcgccactgcctgtagccatcgtattagttcccagaccagagggggctgctggtggctgtccgagaggctgggggtcaggtactgagtctgcgtctccagtctgaccaaaattcaatctttttcttgcaggctgctggcccgcctttccggttcccgaggaggagtctggctccacaggagagtgctctaccggcctcttttttcccggagccgtcttaacaggttcctcaaccaggcccagaggttcaagaaccctctttttcgcctggaagactgctcgtccgaggttgcccccaaaagaggtatcttctttaaggcgctcctgaaactccgcgtcggcgtggttgtacttgaggtacgggttgtctccgctgtcgagctgccggtcgtaggctttgtcgtgctcgagggccgcggcgtctgcctcgttgaccggctctcccttgtcgagtccgttgaagggtccgaggtacttgtacccaggaagcacaagacccctgctgtcgtccttatgccgctctgcgggctttggtggtggtgggccaggtttgagcttccaccactgtcttattccttcagagagagtgtcctcgagccaatcgggtagataaccgtcggcagccagtttaacaggatcccccgggtgatcaagtcttcgtcgagtgattgtaaataaaatgtaatttacagtatagtattttaattaatatacaaatgatttgataataattcttatttaactataatatattgtgttgggttgaattaaaggtccgtatactccggaatattaatagatcatggagataattaaaatgataaccatctcgcaaataaataagtattttactgttttcgtaacagttttgtaataaaaaaacctataaatattccggattattcataccgtcccaccatcgggcgcggatctgccgccctggcggggttttacgagattgtgattaaggtccccagcgaccttgacgagcatctgcccggcatttctgacagctttgtgaactgggtggccgagaaggagtgggagttgccgccagattctgacttggatctgaatctgattgagcaggcacccctgaccgtggccgagaagctgcagcgcgactttctgacggagtggcgccgtgtgagtaaggccccggaggcccttttctttgtgcaatttgagaagggagagagctacttccacttacacgtgctcgtggaaaccaccggggtgaaatccttagttttgggacgtttcctgagtcagattcgcgaaaaactgattcagagaatttaccgcgggatcgagccgactttgccaaactggttcgcggtcacaaagaccagaaacggcgccggaggcgggaacaaggtggtggacgagtgctacatccccaattacttgctccccaaaacccagcctgagctccagtgggcgtggactaatttagaacagtatttaagcgcctgtttgaatctcacggagcgtaaacggttggtggcgcagcatctgacgcacgtgtcgcagacgcaggagcagaacaaagagaatcagaatcccaattctgacgcgccggtgatcagatcaaaaacttcagccaggtacatggagctggtcgggtggctcgtggacaaggggattacctcggagaagcagtggatccaggaggaccaggcctcatacatctccttcaatgcggcctccaactcgcggtcccaaatcaaggctgccttggacaatgcgggaaagattatgagcctgactaaaaccgcccccgactacctggtgggccagcagcccgtggaggacatttccagcaatcggatttataaaattttggaactaaacgggtacgatccccaatatgcggcttccgtctttctgggatgggccacgaaaaagttcggcaagaggaacaccatctggctgtttgggcctgcaactaccgggaagaccaacatcgcggaggccatagcccacactgtgcccttctacgggtgcgtaaactggaccaatgagaactttcccttcaacgactgtgtcgacaagatggtgatctggtgggaggaggggaagatgaccgccaaggtcgtggagtcggccaaagccattctcggaggaagcaaggtgcgcgtggaccagaaatgcaagtcctcggcccagatagacccgactcccgtgatcgtcacctccaacaccaacatgtgcgccgtgattgacgggaactcaacgaccttcgaacaccagcagccgttgcaagaccggatgttcaaatttgaactcacccgccgtctggatcatgactttgggaaggtcaccaagcaggaagtcaaagactttttccggtgggcaaaggatcacgtggttgaggtggagcatgaattctacgtcaaaaagggtggagccaagaaaagacccgcccccagtgacgcagatataagtgagcccaaacgggtgcgcgagtcagttgcgcagccatcgacgtcagacgcggaagcttcgatcaactacgcagacaggtaccaaaacaaatgttctcgtcacgtgggcatgaatctgatgctgtttccctgcagacaatgcgagagaatgaatcagaattcaaatatctgcttcactcacggacagaaagactgtttagagtgctttcccgtgtcagaatctcaacccgtttctgtcgtcaaaaaggcgtatcagaaactgtgctacattcatcatatcatgggaaaggtgccagacgcttgcactgcctgcgatctggtcaatgtggatttggatgactgcatctttgaacaataaactcgaggaatcaagcttgcatgcctgcaggtcgactctagagcctgcagtctcgacaagcttgtcgagaagtactagaggatcataatcagccataccacatttgtagaggttttacttgctttaaaaaacctcccacacctccccctgaacctgaaacataaaatgaatgcaattgttgttgttaacttgtttattgcagcttataatggttacaaataaagcaatagcatcacaaatttcacaaataaagcatttttttcactgcattctagttgtggtttgtccaaactcatcaatgtatcttatcatgtctggatctgatcactgcttgagcctaggagatccgaaccagataagtgaaatctagttccaaactattttgtcatttttaattttcgtattagcttacgacgctacacccagttcccatctattttgtcactcttccctaaataatccttaaaaactccatttccacccctcccagttcccaactattttgtccgcccacagcggggcattgcggccgcatctagatgcattcgcgaggtaccgagctcgaattcactggccgtcgttttacaacgtcgtgactgggaaaaccctggcgttacccaacttaatcgccttgcagcacatccccctttcgccagctggcgtaatagcgaagaggcccgcaccgatcgcccttcccaacagttgcgcagcctgaatggcgaatggcgcctgatgcggtattttctccttacgcatctgtgcggtatttcacaccgcatatggtgcactctcagtacaatctgctctgatgccgcatagttaagccagccccgacacccgccaacacccgctgacgcgccctgacgggcttgtctgctcccggcatccgcttacagacaagctgtgaccgtctccgggagctgcatgtgtcagaggttttcaccgtcatcaccgaaacgcgcga

SEQ ID NO: 1782 - DNA, 7792 bp, Artificial Sequence
  Synthetic polynucleotide
tcgcgcgtttcggtgatgacggtgaaaacctctgacacatgcagctcccggagacggtcacagcttgtctgtaagcggatgccgggagcagacaagcccgtcagggcgcgtcagcgggtgttggcgggtgtcggggctggcttaactatgcggcatcagagcagattgtactgagagtgcaccatatgcggtgtgaaataccgcacagatgcgtaaggagaaaataccgcatcaggcgccattcgccattcaggctgcgcaactgttgggaagggcgatcggtgcgggcctcttcgctattacgccagctggcgaaagggggatgtgctgcaaggcgattaagttgggtaacgccagggttttcccagtcacgacgttgtaaaacgacggccagtgaagccccgctgtgggcggacaaaatagttgggaactgggaggggtggaaatggagtttttaaggattatttagggaagagtgacaaaatagatgggaactgggtgtagcgtcgtaagctaatacgaaaattaaaaatgacaaaatagtttggaactagatttcacttatctggttcggatctcgaccaattgacattattgaagcatttatcagggttattgtctcagacctgcaggcagctgcgcgctcgctcgctcactgaggccgcccgggcaaagcccgggcgtcgggcgacctttggtcgcccggcctcagtgagcgagcgagcgcgcagagagggagtggccaactccatcactaggggttccttgtagttaatgattaacccgccatgctacttatctacgtagccatgcgtcgacataacgcgtatatctagacgttacataacttacggtaaatggcccgcctggctgaccgcccaacgacccccgcccattgacgtcaataatgacgtatgttcccatagtaacgccaatagggactttccattgacgtcaatgggtggagtatttacggtaaactgcccacttggcagtacatcaagtgtatcatatgccaagtacgccccctattgacgtcaatgacggtaaatggcccgcctggcattatgcccagtacatgaccttatgggactttcctacttggcagtacatctagtattagtcatcgctattaccatggtgatgcggttttggcagtacatcaatgggcgtggatagcggtttgactcacggggatttccaagtctccaccccattgacgtcaatgggagtttgttttggcaccaaaatcaacgggactttccaaaatgtcgtaacaactccgccccattgacgcaaatgggcggtaggcgtgtacggtgggaggtctatataagcagagctcgtttagtgaaccgtcagatcgcctggagacgccatccacgctgttttgacctccatagaagacaccgggaccgatccagcctccgcggattcgaatcccggccgggaacggtgcattggaacgcggattccccgtgccaagagtgacgtaagtaccgcctatagagtctataggcccacaaaaaatgctttcttcttttaatatacttttttgtttatcttatttctaatactttccctaatctctttctttcagggcaataatgatacaatgtatcatgcctctttgcaccattctaaagaataacagtgataatttctgggttaaggcaatagcaatatttctgcatataaatatttctgcatataaattgtaactgatgtaagaggtttcatattgctaatagcagctacaatccagctaccattctgcttttattttatggttgggataaggctggattattctgagtccaagctaggcccttttgctaatcatgttcatacctcttatcttcctcccacagctcctgggcaacgtgctggtctgtgtgctggcccatcactttggcaaagaattgggattcgaacatcgattgaattccccggggatccaccatgaacgcaagtgaattccgaaggagagggaaggagatggtggattacgtggccaactacatggaaggcattgagggacgccaggtctaccctgacgtggagcccgggtacctgcggccgctgatccctgccgctgcccctcaggagccagacacgtttgaggacatcatcaacgacgttgagaagataatcatgcctggggtgacgcactggcacagcccctacttcttcgcctacttccccactgccagctcgtacccggccatgcttgcggacatgctgtgcggggccattggctgcatcggcttctcctgggcggcaagcccagcatgcacagagctggagactgtgatgatggactggctcgggaagatgctggaactaccaaaggcatttttgaatgagaaagctggagaagggggaggagtgatccagggaagtgccagtgaagccaccctggtggccctgctggccgctcggaccaaagtgatccatcggctgcaggcagcgtccccagagctcacacaggccgctatcatggagaagctggtggcttactcatccgatcaggcacactcctcagtggaaagagctgggttaattggtggagtgaaattaaaagccatcccctcagatggcaacttcgccatgcgtgcgtctgccctgcaggaagccctggagagagacaaagcggctggcctgattcctttctttatggttgccaccctggggaccacaacatgctgctcctttgacaatctcttagaagtcggtcctatctgcaacaaggaagacatatggctgcacgttgatgcagcctacgcaggcagtgcattcatctgccctgagttccggcaccttctgaatggagtggagtttgcagattcattcaactttaatccccacaaatggctattggtgaattttgactgttctgccatgtgggtgaaaaagagaacagacttaacgggagcctttagactggaccccacttacctgaagcacagccatcaggattcagggcttatcactgactaccggcattggcagataccactgggcagaagatttcgctctttgaaaatgtggtttgtatttaggatgtatggagtcaaaggactgcaggcttatatccgcaagcatgtccagctgtcccatgagtttgagtcactggtgcgccaggatccccgctttgaaatctgtgtggaagtcattctggggcttgtctgctttcggctaaagggttccaacaaagtgaatgaagctcttctgcaaagaataaacagtgccaaaaaaatccacttggttccatgtcacctcagggacaagtttgtcctgcgctttgccatctgttctcgcacggtggaatctgcccatgtgcagcgggcctgggaacacatcaaagagctggcggccgacgtgctgcgagcagagagggagtaggagtgaagccaggacctgcagaagcttgcctcgagcagcgctgctcgagagatctacgggtggcatccctgtgacccctccccagtgcctctcctggccctggaagttgccactccagtgcccaccagccttgtcctaataaaattaagttgcatcattttgtctgactaggtgtccttctataatattatggggtggaggggggtggtatggagcaaggggcaagttgggaagacaacctgtagggcctgcggggtctattgggaaccaagctggagtgcagtggcacaatcttggctcactgcaatctccgcctcctgggttcaagcgattctcctgcctcagcctcccgagttgttgggattccaggcatgcatgaccaggctcagctaatttttgtttttttggtagagacggggtttcaccatattggccaggctggtctccaactcctaatctcaggtgatctacccaccttggcctcccaaattgctgggattacaggcgtgaaccactgctcccttccctgtccttactagatttaaatatgtcgtgcatcgatgctacgtagataagtagcatggcgggttaatcattaactacagaggaacccctagtgatggagttggccactccctctctgcgcgctcgctcgctcactgaggccgggcgaccaaaggtcgcccgacgcccgggctttgcccgggcggcctcagtgagcgagcgagcgcgcagctgcctgcaggctgcctgcaggcatttaattaagcaagctgtagccaaccactagaactatagctagagtcctgggcgaacaaacgatgctcgccttccagaaaaccgaggatgcgaaccacttcatccggggtcagcaccaccggcaagcgccgcgacggccgaggtcttccgatctcctgaagccagggcagatccgtgcacagcaccttgccgtagaagaacagcaaggccgccaatgcctgacgatgcgtggagaccgaaaccttgcgctcgttcgccagccaggacagaaatgcctcgacttcgctgctgcccaaggttgccgggtgacgcacaccgtggaaacggatgaaggcacgaacccagttgacataagcctgttcggttcgtaaactgtaatgcaagtagcgtatgcgctcacgcaactggtccagaaccttgaccgaacgcagcggtggtaacggcgcagtggcggttttcatggcttgttatgactgtttttttgtacagtctatgcctcgggcatccaagcagcaagcgcgttacgccgtgggtcgatgtttgatgttatggagcagcaacgatgttacgcagcagcaacgatgttacgcagcagggcagtcgccctaaaacaaagttaggtggctcaagtatgggcatcattcgcacatgtaggctcggccctgaccaagtcaaatccatgcgggctgctcttgatcttttcggtcgtgagttcggagacgtagccacctactcccaacatcagccggactccgattacctcgggaacttgctccgtagtaagacattcatcgcgcttgctgccttcgaccaagaagcggttgttggcgctctcgcggcttacgttctgcccaagtttgagcagccgcgtagtgagatctatatctatgatctcgcagtctccggcgagcaccggaggcagggcattgccaccgcgctcatcaatctcctcaagcatgaggccaacgcgcttggtgcttatgtgatctacgtgcaagcagattacggtgacgatcccgcagtggctctctatacaaagttgggcatacgggaagaagtgatgcactttgatatcgacccaagtaccgccacctaacaattcgttcaagccgagatcggcttcccggccgcggagttgttcggtaaattgtcacaacgccgcgaatatagtctttaccatgcccttggccacgcccctctttaatacgacgggcaatttgcacttcagaaaatgaagagtttgctttagccataacaaaagtccagtatgctttttcacagcataactggactgatttcagtttacaactattctgtctagtttaagactttattgtcatagtttagatctattttgttcagtttaagactttattgtccgcccacacccgcttggcgtaatcatggtcatagctgtttcctgtgtgaaattgttatccgctcacaattccacacaacatacgagccggaagcataaagtgtaaagcctggggtgcctaatgagtgagctaactcacattaattgcgttgcgctcactgcccgctttccagtcgggaaacctgtcgtgccagctgcattaatgaatcggccaacgcgcggggagaggcggtttgcgtattgggcgctcttccgcttcctcgctcactgactcgctgcgctcggtcgttcggctgcggcgagcggtatcagctcactcaaaggcggtaatacggttatccacagaatcaggggataacgcaggaaagaacatgtgagcaaaaggccagcaaaaggccaggaaccgtaaaaaggccgcgttgctggcgtttttccataggctccgcccccctgacgagcatcacaaaaatcgacgctcaagtcagaggtggcgaaacccgacaggactataaagataccaggcgtttccccctggaagctccctcgtgcgctctcctgttccgaccctgccgcttaccggatacctgtccgcctttctcccttcgggaagcgtggcgctttctcatagctcacgctgtaggtatctcagttcggtgtaggtcgttcgctccaagctgggctgtgtgcacgaaccccccgttcagcccgaccgctgcgccttatccggtaactatcgtcttgagtccaacccggtaagacacgacttatcgccactggcagcagccactggtaacaggattagcagagcgaggtatgtaggcggtgctacagagttcttgaagtggtggcctaactacggctacactagaagaacagtatttggtatctgcgctctgctgaagccagttaccttcggaaaaagagttggtagctcttgatccggcaaacaaaccaccgctggtagcggtggtttttttgtttgcaagcagcagattacgcgcagaaaaaaaggatctcaagaagatcctttgatcttttctacggggtctgacgctcagtggaacgaaaactcacgttaagggattttggtcatgagattatcaaaaaggatcttcacctagatccttttaaattaaaaatgaagttttaaatcaatctaaagtatatatgagtaaacttggtctgacagttaccaatgcttaatcagtgaggcacctatctcagcgatctgtctatttcgttcatccatagttgcctgactccccgtcgtgtagataactacgatacgggagggcttaccatctggccccagtgctgcaatgataccgcgagacccacgctcaccggctccagatttatcagcaataaaccagccagccggaagggccgagcgcagaagtggtcctgcaactttatccgcctccatccagtctattaattgttgccgggaagctagagtaagtagttcgccagttaatagtttgcgcaacgttgttgccattgctacaggcatcgtggtgtcacgctcgtcgtttggtatggcttcattcagctccggttcccaacgatcaaggcgagttacatgatcccccatgttgtgcaaaaaagcggttagctccttcggtcctccgatcgttgtcagaagtaagttggccgcagtgttatcactcatggttatggcagcactgcataattctcttactgtcatgccatccgtaagatgcttttctgtgactggtgagtactcaaccaagtcattctgagaatagtgtatgcggcgaccgagttgctcttgcccggcgtcaatacgggataataccgcgccacatagcagaactttaaaagtgctcatcattggaaaacgttcttcggggcgaaaactctcaaggatcttaccgctgttgagatccagttcgatgtaacccactcgtgcacccaactgatcttcagcatcttttactttcaccagcgtttctgggtgagcaaaaacaggaaggcaaaatgccgcaaaaaagggaataagggcgacacggaaatgttgaatactcatactcttcctttttcaatattattgaagcatttatcagggttattgtctcatgagcggatacatatttgaatgtatttagaaaaataaacaaataggggttccgcgcacatttccccgaaaagtgccacctgacgtctaagaaaccattattatcatgacattaacctataaaaataggcgtatcacgaggccctttcgtc

SEQ ID NO: 1783 - DNA, 142211 bp, Artificial Sequence
  Synthetic polynucleotide
gaattctacccgtaaagcgagtttagttttgaaaaacaaatgacatcatttgtataatgacatcatcccctgattgtgttttacaagtagaattctatccgtaaagcgagttcagttttgaaaacaaatgagtcatacctaaacacgttaataatcttctgatatcagcttatgactcaagttatgagccgtgtgcaaaacatgagataagtttatgacatcatccactgatcgtgcgttacaagtagaattctactcgtaaagccagttcggttatgagccgtgtgcaaaacatgacatcagcttatgactcatacttgattgtgttttacgcgtagaattctactcgtaaagcgagttcggttatgagccgtgtgcaaaacatgacatcagcttatgagtcataattaatcgtgcgttacaagtagaattctactcgtaaagcgagttgaaggatcatatttagttgcgtttatgagataagattgaaagcacgtgtaaaatgtttcccgcgcgttggcacaactatttacaatgcggccaagttataaaagattctaatctgatatgttttaaaacacctttgcggcccgagttgtttgcgtacgtgactagcgaagaagatgtgtggaccgcagaacagatagtaaaacaaaaccctagtattggagcaataatcgatttaaccaacacgtctaaatattatgatggtgtgcattttttgcgggcgggcctgttatacaaaaaaattcaagtacctggccagactttgccgcctgaaagcatagttcaagaatttattgacacggtaaaagaatttacagaaaagtgtcccggcatgttggtgggcgtgcactgcacacacggtattaatcgcaccggttacatggtgtgcagatatttaatgcacaccctgggtattgcgccgcaggaagccatagatagattcgaaaaagccagaggtcacaaaattgaaagacaaaattacgttcaagatttattaatttaattaatattatttgcattctttaacaaatactttatcctattttcaaattgttgcgcttcttccagcgaaccaaaactatgcttcgcttgctccgtttagcttgtagccgatcagtggcgttgttccaatcgacggtaggattaggccggatattctccaccacaatgttggcaacgttgatgttacgtttatgcttttggttttccacgtacgtcttttggccggtaatagccgtaaacgtagtgccgtcgcgcgtcacgcacaacaccggatgtttgcgcttgtccgcggggtattgaaccgcgcgatccgacaaatccaccactttggcaactaaatcggtgacctgcgcgtcttttttctgcattatttcgtctttcttttgcatggtttcctggaagccggtgtacatgcggtttagatcagtcatgacgcgcgtgacctgcaaatctttggcctcgatctgcttgtccttgatggcaacgatgcgttcaataaactcttgttttttaacaagttcctcggttttttgcgccaccaccgcttgcagcgcgtttgtgtgctcggtgaatgtcgcaatcagcttagtcaccaactgtttgctctcctcctcccgttgtttgatcgcgggatcgtacttgccggtgcagagcacttgaggaattacttcttctaaaagccattcttgtaattctatggcgtaaggcaatttggacttcataatcagctgaatcacgccggatttagtaatgagcactgtatgcggctgcaaatacagcgggtcgccccttttcacgacgctgttagaggtagggcccccattttggatggtctgctcaaataacgatttgtatttattgtctacatgaacacgtatagctttatcacaaactgtatattttaaactgttagcgacgtccttggccacgaaccggacctgttggtcgcgctctagcacgtaccgcaggttgaacgtatcttctccaaatttaaattctccaattttaacgcgagccattttgatacacgtgtgtcgattttgcaacaactattgttttttaacgcaaactaaacttattgtggtaagcaataattaaatatgggggaacatgcgccgctacaacactcgtcgttatgaacgcagacggcgccggtctcggcgcaagcggctaaaacgtgttgcgcgttcaacgcggcaaacatcgcaaaagccaatagtacagttttgatttgcatattaacggcgattttttaaattatcttatttaataaatagttatgacgcctacaactccccgcccgcgttgactcgctgcacctcgagcagttcgttgacgccttcctccgtgtggccgaacacgtcgagcgggtggtcgatgaccagcggcgtgccgcacgcgacgcacaagtatctgtacaccgaatgatcgtcgggcgaaggcacgtcggcctccaagtggcaatattggcaaattcgaaaatatatacagttgggttgtttgcgcatatctatcgtggcgttgggcatgtacgtccgaacgttgatttgcatgcaagccgaaattaaatcattgcgattagtgcgattaaaacgttgtacatcctcgcttttaatcatgccgtcgattaaatcgcgcaatcgagtcaagtgatcaaagtgtggaataatgttttctttgtattcccgagtcaagcgcagcgcgtattttaacaaactagccatcttgtaagttagtttcatttaatgcaactttatccaataatatattatgtatcgcacgtcaagaattaacaatgcgcccgttgtcgcatctcaacacgactatgatagagatcaaataaagcgcgaattaaatagcttgcgacgcaacgtgcacgatctgtgcacgcgttccggcacgagctttgattgtaataagtttttacgaagcgatgacatgacccccgtagtgacaacgatcacgcccaaaagaactgccgactacaaaattaccgagtatgtcggtgacgttaaaactattaagccatccaatcgaccgttagtcgaatcaggaccgctggtgcgagaagccgcgaagtatggcgaatgcatcgtataacgtgtggagtccgctcattagagcgtcatgtttagacaagaaagctacatatttaattgatcccgatgattttattgataaattgaccctaactccatacacggtattctacaatggcggggttttggtcaaaatttccggactgcgattgtacatgctgttaacggctccgcccactattaatgaaattaaaaattccaattttaaaaaacgcagcaagagaaacatttgtatgaaagaatgcgtagaaggaaagaaaaatgtcgtcgacatgctgaacaacaagattaatatgcctccgtgtataaaaaaaatattgaacgatttgaaagaaaacaatgtaccgcgcggcggtatgtacaggaagaggtttatactaaactgttacattgcaaacgtggtttcgtgtgccaagtgtgaaaaccgatgtttaatcaaggctctgacgcatttctacaaccacgactccaagtgtgtgggtgaagtcatgcatcttttaatcaaatcccaagatgtgtataaaccaccaaactgccaaaaaatgaaaactgtcgacaagctctgtccgtttgctggcaactgcaagggtctcaatcctatttgtaattattgaataataaaacaattataaatgctaaatttgttttttattaacgatacaaaccaaacgcaacaagaacatttgtagtattatctataattgaaaacgcgtagttataatcgctgaggtaatatttaaaatcattttcaaatgattcacagttaatttgcgacaatataattttattttcacataaactagacgccttgtcgtcttcttcttcgtattccttctctttttcatttttctcctcataaaaattaacatagttattatcgtatccatatatgtatctatcgtatagagtaaattttttgttgtcataaatatatatgtcttttttaatggggtgtatagtaccgctgcgcatagtttttctgtaatttacaacagtgctattttctggtagttcttcggagtgtgttgctttaattattaaatttatataatcaatgaatttgggatcgtcggttttgtacaatatgttgccggcatagtacgcagcttcttctagttcaattacaccattttttagcagcaccggattaacataactttccaaaatgttgtacgaaccgttaaacaaaaacagttcacctcccttttctatactattgtctgcgagcagttgtttgttgttaaaaataacagccattgtaatgagacgcacaaactaatatcacaaactggaaatgtctatcaatatatagttgctgatgggtaccttctagaattccggagcggccgctgcagatcccccgggctgcaggggggggggggcgctgaggtctgcctcgtgaagaaggtgttgctgactcataccaggcctgaatcgccccatcatccagccagaaagtgagggagccacggttgatgagagctttgttgtaggtggaccagttggtgattttgaacttttgctttgccacggaacggtctgcgttgtcgggaagatgcgtgatctgatccttcaactcagcaaaagttcgatttattcaacaaagccgccgtcccgtcaagtcagcgtaatgctctgccagtgttacaaccaattaaccaattctgattagaaaaactcatcgagcatcaaatgaaactgcaatttattcatatcaggattatcaataccatatttttgaaaaagccgtttctgtaatgaaggagaaaactcaccgaggcagttccataggatggcaagatcctggtatcggtctgcgattccgactcgtccaacatcaatacaacctattaatttcccctcgtcaaaaataaggttatcaagtgagaaatcaccatgagtgacgactgaatccggtgagaatggcaaaagcttatgcatttctttccagacttgttcaacaggccagccattacgctcgtcatcaaaatcactcgcatcaaccaaaccgttattcattcgtgattgcgcctgagcgagacgaaatacgcgatcgctgttaaaaggacaattacaaacaggaatcgaatgcaaccggcgcaggaacactgccagcgcatcaacaatattttcacctgaatcaggatattcttctaatacctggaatgctgttttcccggggatcgcagtggtgagtaaccatgcatcatcaggagtacggataaaatgcttgatggtcggaagaggcataaattccgtcagccagtttagtctgaccatctcatctgtaacatcattggcaacgctacctttgccatgtttcagaaacaactctggcgcatcgggcttcccatacaatcgatagattgtcgcacctgattgcccgacattatcgcgagcccatttatacccatataaatcagcatccatgttggaatttaatcgcggcctcgagcaagacgtttcccgttgaatatggctcataacaccccttgtattactgtttatgtaagcagacagttttattgttcatgatgatatatttttatcttgtgcaatgtaacatcagagattttgagacacaacgtggctttcccccccccccctgcaggaattaagtcttcgaaccaatacgcaaaccgcctctccccgcgcgttggccgattcattaatgcagctggcacgacaggtttcccgactggaaagcgggcagtgagcgcaacgcaattaatgtgagttagctcactcattaggcaccccaggctttacactttatgcttccggctcgtatgttgtgtggaattgtgagcggataacaatttcacacaggaaacagctatgaccatgattacgccaagcgcgcaattaaccctcactaaagggaacaaaagctggagctccaccgcggtggcggccgctctagaactagtggatcccccgggctgcaggaattcacataacaggaagaaaaatgccccgcttacgcagggcatccatttattactcaaccgtaaccgattttgccaggttacgcggctgtcgacctcgagggggggcccggtacccaattcgccctatagtgagtcgtattacgcgcgctcactggccgtcgttttacaacgtcgtgactgggaaaaccctggcgttacccaacttaatcgccttgcagcacatccccctttcgccagctggcgtaatagcgaagaggcccgcaccgatcgcccttcccaacagttgcgcagcctgaatggcgaatgggacgcgccctgtagcggcgcattaagcgcggcgggtgtggtggttacgcgcttcgaagacgctcgacagcgacacacttgcatcggatgcagcccggttaacgtgccggcacggcctgggtaaccaggtattttgtccacataaccgtgcgcaaaatgttgtggataagcaggacacagcagcaatccacagcaggcatacaaccgcacaccgaggttactccgttctacaggttacgacgacatgtcaatacttgcccttgacaggcattgatggaatcgtagtctcacgctgatagtctgatcgacaatacaagtgggaccgtggtcccagaccgataatcagaccgacaacacgagtgggatcgtggtcccagactaataatcagaccgacgatacgagtgggaccgtggtcccagactaataatcagaccgacgatacgagtgggaccgtggtcccagactaataatcagaccgacgatacgagtgggaccgtggtcccagactaataatcagaccgacgatacgagtgggaccatggtcccagactaataatcagaccgacgatacgagtgggaccgtggtcccagtctgattatcagaccgacgatacgagtgggaccgtggtcccagactaataatcagaccgacgatacgagtgggaccgtggtcccagactaataatcagaccgacgatacgagtgggaccgtggtcccagtctgattatcagaccgacgatacaagtggaacagtgggcccagagagaatattcaggccagttatgctttctggcctgtaacaaaggacattaagtaaagacagataaacgtagactaaaacgtggtcgcatcagggtgctggcttttcaagttccttaagaatggcctcaattttctctatacactcagttggaacacgagacctgtccaggttaagcaccattttatcgcccttatacaatactgtcgctccaggagcaaactgatgtcgtgagcttaaactagttcttgatgcagatgacgttttaagcacagaagttaaaagagtgataacttcttcagcttcaaatatcaccccagcttttttctgctcatgaaggttagatgcctgctgcttaagtaattcctctttatctgtaaaggctttttgaagtgcatcacctgaccgggcagatagttcaccggggtgagaaaaaagagcaacaactgatttaggcaatttggcggtgttgatacagcgggtaataatcttacgtgaaatattttccgcatcagccagcgcagaaatatttccagcaaattcattctgcaatcggcttgcataacgctgaccacgttcataagcacttgttgggcgataatcgttacccaatctggataatgcagccatctgctcatcatccagctcgccaaccagaacacgataatcactttcggtaagtgcagcagctttacgacggcgactcccatcggcaatttctatgacaccagatactcttcgaccgaacgccggtgtctgttgaccagtcagtagaaaagaagggatgagatcatccagtgcgtcctcagtaagcagctcctggtcacgttcattacctgaccatacccgagaggtcttctcaacactatcaccccggagcacttcaagagtaaacttcacatcccgaccacatacaggcaaagtaatggcattaccgcgagccattactcctacgcgcgcaattaacgaatccaccatcggggcagctggtgtcgataacgaagtatcttcaaccggttgagtattgagcgtatgttttggaataacaggcgcacgcttcattatctaatctcccagcgtggtttaatcagacgatcgaaaatttcattgcagacaggttcccaaatagaaagagcatttctccaggcaccagttgaagagcgttgatcaatggcctgttcaaaaacagttctcatccggatctgacctttaccaacttcatccgtttcacgtacaacattttttagaaccatgcttccccaggcatcccgaatttgctcctccatccacggggactgagagccattactattgctgtatttggtaagcaaaatacgtacatcaggctcgaaccctttaagatcaacgttcttgagcagatcacgaagcatatcgaaaaactgcagtgcggaggtgtagtcaaacaactcagcaggcgtgggaacaatcagcacatcagcagcacatacgacattaatcgtgccgatacccaggttaggcgcgctgtcaataactatgacatcatagtcatgagcaacagtttcaatggccagtcggagcatcaggtgtggatcggtgggcagtttaccttcatcaaatttgcccattaactcagtttcaatacggtgcagagccagacaggaaggaataatgtcaagccccggccagcaagtgggctttattgcataagtgacatcgtccttttccccaagatagaaaggcaggagagtgtcttctgcatgaatatgaagatctggtacccatccgtgatacattgaggctgttccctgggggtcgttaccttccacgagcaaaacacgtagccccttcagagccagatcctgagcaagatgaacagaaactgaggttttgtaaacgccacctttatgggcagcaaccccgatcaccggtggaaatacgtcttcagcacgtcgcaatcgcgtaccaaacacatcacgcatatgattaatttgttcaattgtataaccaacacgttgctcaacccgtcctcgaatttccatatccgggtgcggtagtcgccctgctttctcggcatctctgatagcctgagaagaaaccccaactaaatccgctgcttcacctattctccagcgccgggttattttcctcgcttccgggctgtcatcattaaactgtgcaatggcgatagccttcgtcatttcatgaccagcgtttatgcactggttaagtgtttccatgagtttcattctgaacatcctttaatcattgctttgcgtttttttattaaatcttgcaatttactgcaaagcaacaacaaaatcgcaaagtcatcaaaaaaccgcaaagttgtttaaaataagagcaacactacaaaaggagataagaagagcacatacctcagtcacttattatcactagcgctcgccgcagccgtgtaaccgagcatagcgagcgaactggcgaggaagcaaagaagaactgttctgtcagatagctcttacgctcagcgcaagaagaaatatccaccgtgggaaaaactccaggtagaggtacacacgcggatagccaattcagagtaataaactgtgataatcaaccctcatcaatgatgacgaactaacccccgatatcaggtcacatgacgaagggaaagagaaggaaatcaactgtgacaaactgccctcaaatttggcttccttaaaaattacagttcaaaaagtatgagaaaatccatgcaggctgaaggaaacagcaaaactgtgacaaattaccctcagtaggtcagaacaaatgtgacgaaccaccctcaaatctgtgacagataaccctcagactatcctgtcgtcatggaagtgatatcgcggaaggaaaatacgatatgagtcgtctggcggcctttctttttctcaatgtatgagaggcgcattggagttctgctgttgatctcattaacacagacctgcaggaagcggcggcggaagtcaggcatacgctggtaactttgaggcagctggtaacgctctatgatccagtcgattttcagagagacgatgcctgagccatccggcttacgatactgacacagggattcgtataaacgcatggcatacggattggtgatttcttttgtttcactaagccgaaactgcgtaaaccggttctgtaacccgataaagaagggaatgagatatgggttgatatgtacactgtaaagccctctggatggactgtgcgcacgtttgataaaccaaggaaaagattcatagcctttttcatcgccggcatcctcttcagggcgataaaaaaccacttccttccccgcgaaactcttcaatgcctgccgtatatccttactggcttccgcagaggtcaatccgaatatttcagcatatttagcaacatggatctcgcagataccgtcatgttcctgtagggtgccatcagattttctgatctggtcaacgaacagatacagcatacgtttttgatcccgggagagactatatgccgcctcagtgaggtcgtttgactggacgattcgcgggctatttttacgtttcttgtgattgataaccgctgtttccgccatgacagatccatgtgaagtgtgacaagtttttagattgtcacactaaataaaaaagagtcaataagcagggataactttgtgaaaaaacagcttcttctgagggcaatttgtcacagggttaagggcaatttgtcacagacaggactgtcatttgagggtgatttgtcacactgaaagggcaatttgtcacaacaccttctctagaaccagcatggataaaggcctacaaggcgctctaaaaaagaagatctaaaaactataaaaaaaataattataaaaatatccccgtggataagtggataaccccaagggaagttttttcaggcatcgtgtgtaagcagaatatataagtgctgttccctggtgcttcctcgctcactcgagggcttcgccctgtcgctcgactgcggcgagcactactggctgtaaaaggacagaccacatcatggttctgtgttcattaggttgttctgtccattgctgacataatccgctccacttcaacgtaacaccgcacgaagatttctattgttcctgaaggcatattcaaatcgttttcgttaccgcttgcaggcatcatgacagaacactacttcctataaacgctacacaggctcctgagattaataatgcggatctctacgataatgggagattttcccgactgtttcgttcgcttctcagtggataacagccagcttctctgtttaacagacaaaaacagcatatccactcagttccacatttccatataaaggccaaggcatttattctcaggataattgtttcagcatcgcaaccgcatcagactccggcatcgcaaactgcacccggtgccgggcagccacatccagcgcaaaaaccttcgtgtagacttccgttgaactgatggacttatgtcccatcaggctttgcagaactttcagcggtataccggcatacagcatgtgcatcgcataggaatggcggaacgtatgtggtgtgaccggaacagagaacgtcacaccgtcagcagcagcggcggcaaccgcctccccaatccaggtcctgaccgttctgtccgtcacttcccagatccgcgctttctctgtccttcctgtgcgacggttacgccgctccatgggtattttcagtgttgccaccatcgtctgcagctggctgacgtaccaggagtcagagagcggaaccagccggtgagtctgctgaccggcgggcattctccccgccgtcctggcagctttttcggtccgttgtttcagggtcgcaagctgcacaaacggatacggaggcgcaagcgaaaaatccccccgcgtcagcgccagtgcttcattaatgcgtgctccggtgttccacagtgtggccagcagcatcttgcggtgcagatccgggacgtaatggagcagggcactcacttccggagccagcagatattttggcagttcatcatggaccatcgacatctggcgaagtgccagagctgccggataatcaatggcaacaggcagcgatgcaggctgcccggcagaatacactgccggtaccatgactgcagactggctgtgtataacggagcctgacatttatattccccagaacatcaggttaatggcgtttttgatgtcattttcgcggtggctgagatcagccacttcttccccgataacggagaccggcacactggccatatcggtggtcatcatgcgccagctttcatccccgatatgcaccaccgggtaaagttcacgggagactttatctgacagcagacgtgcactggccagggggatcaccatccgtcgcccgggcgtgtcaataatatcactctgtacatccacaaacagacgataacggctctctcttttataggtgtaaaccttaaactgcatttcaccagtccctgttctcgtcagcaaaagagccgttcatttcaataaaccgggcgacctcagccatcccttcctgattttccgctttccagcgttcggcacgcagacgacgggcttcattctgcatggttgtgcttaccagaccggagatattgacatcatatgccttgagcaactgatagctgtcgctgtcaactgtcactgtaatacgctgcttcatagcacacctctttttgacatacttcgggtatacatatcagtatatattcttataccgcaaaaatcagcgcgcaaatacgcatactgttatctggcttttagtaagccttatgtattttacctttcgttatgttaaccaataaaaattaaaatctgacttataaaaacaaagcgtaattaccgcattcccgtttcgtatggatctgatcctttcctgggacccggcaagaaccaaaaactcactctcttcaaggaaatccgtaatgttaaacccgacacgatgaagcttgtcgttggatggaaaggaaaagagttctacagggaaacttggacccgcttcatggaagacagcttccccattgttaacgaccaagaagtgatggatgttttccttgttgtcaacatgcgtcccactagacccaaccgttgttacaaattcctggcccaacacgctctgcgttgcgaccccgactatgtacctcatgacgtgattaggatcgtcgagccttcatgggtgggcagcaacaacgagtaccgcatcagcctggctaagaagggcggcggctgcccaataatgaaccttcactctgagtacaccaactcgttcgaacagttcatcgatcgtgtcatctgggagaacttctacaagcccatcgtttacatcggtaccgactctgctgaagaggaggaaattctccttgaagtttccctggtgttcaaagtaaaggagtttgcaccagacgcacctctgttcactggtccggcgtattaaaacacgatacattgttattagtacatttattaagcgctagattctgtgcgttgttgatttacagacaattgttgtacgtattttaataattcattaaatttataatctttagggtggtatgttagagcgaaaatcaaatgattttcagcgtctttatatctgaatttaaatattaaatcctcaatagatttgtaaaataggtttcgattagtttcaaacaagggttgtttttccgaaccgatggctggactatctaatggattttcgctcaacgccacaaaacttgccaaatcttgtagcagcaatctagctttgtcgatattcgtttgtgttttgttttgtaataaaggttcgacgtcgttcaaaatattatgcgcttttgtatttctttcatcactgtcgttagtgtacaattgactcgacgtaaacacgttaaataaagcttggacatatttaacatcgggcgtgttagctttattaggccgattatcgtcgtcgtcccaaccctcgtcgttagaagttgcttccgaagacgattttgccatagccacacgacgcctattaattgtgtcggctaacacgtccgcgatcaaatttgtagttgagctttttggaattatttctgattgcgggcgtttttgggcgggtttcaatctaactgtgcccgattttaattcagacaacacgttagaaagcgatggtgcaggcggtggtaacatttcagacggcaaatctactaatggcggcggtggtggagctgatgataaatctaccatcggtggaggcgcaggcggggctggcggcggaggcggaggcggaggtggtggcggtgatgcagacggcggtttaggctcaaatgtctctttaggcaacacagtcggcacctcaactattgtactggtttcgggcgccgtttttggtttgaccggtctgagacgagtgcgatttttttcgtttctaatagcttccaacaattgttgtctgtcgtctaaaggtgcagcgggttgaggttccgtcggcattggtggagcgggcggcaattcagacatcgatggtggtggtggtggtggaggcgctggaatgttaggcacgggagaaggtggtggcggcggtgccgccggtataatttgttctggtttagtttgttcgcgcacgattgtgggcaccggcgcaggcgccgctggctgcacaacggaaggtcgtctgcttcgaggcagcgcttggggtggtggcaattcaatattataattggaatacaaatcgtaaaaatctgctataagcattgtaatttcgctatcgtttaccgtgccgatatttaacaaccgctcaatgtaagcaattgtattgtaaagagattgtctcaagctcggatcccgcacgccgataacaagccttttcatttttactacagcattgtagtggcgagacacttcgctgtcgtcgacgtacatgtatgctttgttgtcaaaaacgtcgttggcaagctttaaaatatttaaaagaacatctctgttcagcaccactgtgttgtcgtaaatgttgtttttgataatttgcgcttccgcagtatcgacacgttcaaaaaattgatgcgcatcaattttgttgttcctattattgaataaataagattgtacagattcatatctacgattcgtcatggccaccacaaatgctacgctgcaaacgctggtacaattttacgaaaactgcaaaaacgtcaaaactcggtataaaataatcaacgggcgctttggcaaaatatctattttatcgcacaagcccactagcaaattgtatttgcagaaaacaatttcggcgcacaattttaacgctgacgaaataaaagttcaccagttaatgagcgaccacccaaattttataaaaatctattttaatcacggttccatcaacaaccaagtgatcgtgatggactacattgactgtcccgatttatttgaaacactacaaattaaaggcgagctttcgtaccaacttgttagcaatattattagacagctgtgtgaagcgctcaacgatttgcacaagcacaatttcatacacaacgacataaaactcgaaaatgtcttatatttcgaagcacttgatcgcgtgtatgtttgcgattacggattgtgcaaacacgaaaactcacttagcgtgcacgacggcacgttggagtattttagtccggaaaaaattcgacacacaactatgcacgtttcgtttgactggtacgccgtcggcgtgttaacatacaagttgctaaccggcggccgacacccatttgaaaaaagcgaagacgaaatgttggacttgaatagcatgaagcgtcgtcagcaatacaatgacattggcgttttaaaacacgttcgtaacgttaacgctcgtgactttgtgtactgcctaacaagatacaacatagattgtagactcacaaattacaaacaaattataaaacatgagtttttgtcgtaaaaatgccacttgttttacgagtagaattctacgtgtaacacacgatctaaaagatgatgtcattttttatcaatgactcatttgttttaaaacagacttgttttacgagtagaattctacgtgtaaagcatgatcgtgagtggtgttaataaaatcataaaaattattgtaaatgtttattatttaaaaacgattcaaatatataataaaaacaatctacatctatttcttcacaatccataacacacaacaggtccatcaatgagtttttgtctttatccgacatactatgtgcatgtaacaaatcaaatacatcttttaaatttttatacacatctttacattgtctaccaaaatctttaataaccctataacaaggaaaagacttttcttcttgcgtggttttgccgcgcagatattgaaataaaatgtgcatgcacgacaacttgtgtttactaaaatgctccttgcctataccgcaaaaccggccatacatttcggcgattacacgcggacaattgtacgattcgtctacgtgtaaacgatcatcataatcactcttgcgcaaacgaataaattttttcaccgcttccgacaaacgaggcaccaattcggcgggcacgcttcgatacattattctgtgcacataagttaccacacaaaatttattgtaccaccatccgacaacgtcgttattagggttgaacacgttggcgatgcgcagcagtttcccgtttctcatgaaatattcaaagcggcccaaaataatttgcaagcaatccaacatgtcttgagaaatttctcgttcaaaattgttcaaagagaatatctgccatccgttttgaacgcgcacgctgacgggaaccaccgcatcgatttgctccaacacttcacggacgttatcgtcgatgcccatcgtttcgctggtgctgaaccaatgggaaaggctcttgatggaatcgcccgcgtctatcatcttgaccgcttcgtcaaaggtgcaactgccgctcttcaaacgccgcatagcggtcacgtcccgctctatgcacgacataccgtttacgtacgattctgataggtattcctgaactatacggtaatggtgatacgactcgccatacacgtcgtgcacctcattgtatttagcataataattgtaaattattaactttgcagcgagagacatgttgtcagtaaagcggtgctaggctcaataatactgatgtacaggcacgcgtgctatttatatataatttcgcaaggaggggagctgttatcggttgctattattaaagaatggccgtctgtttttatcacaagcttggcagcctcaaccatgaagcgtcgtcattgtaaattaaattctctgcctcaagaattatttgacaagattgtcgagtatttatctttatctgattactgcaatttggtgcttgtctgtaaaagaccttctagtaaatataacgtgatatttgatagtactaatcaccaacatttgaaaggcgtgtacaaaaagacagacgtgcaaataacaagctacaacgaatacatcaactgtatttgcaacgaactgagacaagacgaattctatgccaaatcatcatggattgcgagtatttgcggtcaccagagagcgacaatttttagtgtaacaaataaacaagtagaaatgaaatatcatttgtataatatagcaattgtggaaagtgaagattgcaacggattttacccatttgagccaacgcgcgattgtttaatatgcaaacaaaaaaaccaatgtcctcgtaattcatttattgtttcgttgtgtaaatatttagaaaaacaaaatgtacaatcaaactttatatattatttatacgaaataaatacataataataactattatacatgtttttattttacaatacttcctgtataacctctctaactacattaggagtacaatccacgtcaattacacgtttagctatttttctaattttgtaatgtttatcgtagagtttttcgttaatacattgaatagccaacaagggatttgggtgcacaccgtcatagagtacttccatgtcgtcttcaaagcgcatttttcgcttgcgaaaatgccgctcttggcccaaaacaaaagcgagtttgatgcggtcgtcgatgcgttccgaaaatacggccaaatgctggtgtttggtgatgtcgcgcggaaacgtcaccgtgccatttttgctttccgccacgacggcggttttcaatttttcggccgactgcagcatgttaagtttggcgtcgagttcgtgcaaacgcaattcaaactgctcaaacctgttgcccacctcgttcttgaacgtctcgtgggtgaccataaatttttcgctgtttgcattcagtttctttacatgttttaaaacagattcaatcttgtcgcgcaaatcatcacgctcgccttcagtttgaatgtgcagcaacgcgttgcttttgttggcaaaatttaaccgcatcaaaatttccaacaacccgtgcttggtcgcgaacaatgcgcccaacgagttgagatcgcgtttggatctctgtttgtgaaaaacaatttcgtttaaatggtaaacttgatcgccgtcccaattgcaatcaagtatgtcgtcgtgcgcaatttcaagacctttgcaaaaatctatcacattgtagcattttgcgttcgtgtcgctgtgcacgtatctgtacttgaaactgtgcgtgttgcatttgaatgagtcccatttaacgatgtgcgaccattgttgggcgtttatgtggtactttttgtagtcgtctgcattgaaccgatcttcggcggcgatggcgtcgttgtcgttgtcaccggaccacatccaccagttccataaccaggatagcattgctttagcttgtctagcaattcctttgttatacaacgagaaaatttcgttcccttataattatagctgtacggtgcgcgtatttgtttgttaacgttacaaaaaatatccctgtccacgtccggccaatactgcaacgtgagcgcgtccaagtttgaatcttgcatatgcggaacgtacaaacgtacggcctctctcacacaatgcgcaaaactgcccggctgaatgtaatcactgtccaactttgcaggtttctcgaaagccttgtaccgatgcacgcgaacattttgagcggacgtgattttaaacttgtcggtgaattttaaccacaaatgaaatccacggttgccggtatacatgactcttgacacgttctcttccgtgtaaaacaacagaaacgccgtggcgccaatgtaaattttcagcattaaatcgtgttcgtcaacataatttttgtaatcggcgtctacgacccattccctgccgccgccgtcgtccaacggtttgacgtgcacgtcggacactttgttttgcacaatataactatacaattgtgcggaggtatcaaaatatctgtcggcgtgaatccagcgcgcgttgaccgtcatgaacgcgtacttgcggctgtcgttgtacgcaatggcgtcccacatcatgtcgacgcgcttctgcgtataattgcacactaacatgttgccctttgaacttgacctcgattgtgttaatttttggctataaaaaggtcaccctttaaaatttgttacataatcaaattaccagtacagttattcggtttgaagcaaaatgactattctctgctggcttgcactgctgtctacgcttactgctgtaaatgcggccaatatattggccgtgtttcctacgccagcttacagccaccatatagtgtacaaagtgtatattgaagcccttgccgaaaaatgtcacaacgttacggtcgtcaagcccaaactgtttgcgtattcaactaaaacttattgcggtaatatcacggaaattaatgccgacatgtctgttgagcaatacaaaaaactagtggcgaattcggcaatgtttagaaagcgcggagtggtgtccgatacagacacggtaaccgccgctaactacctaggcttgattgaaatgttcaaagaccagtttgacaatatcaacgtgcgcaatctcattgccaacaaccagacgtttgatttagtcgtcgtggaagcgtttgccgattatgcgttggtgtttggtcacttgtacgatccggcgcccgtaattcaaatcgcgcctggctacggtttggcggaaaactttgacacggtcggcgccgtggcgcggcaccccgtccaccatcctaacatttggcgcagcaatttcgacgacacggaggcaaacgtgatgacggaaatgcgtttgtataaagaatttaaaattttggccaacatgtccaacgcgttgctcaaacaacagtttggacccaacacaccgacaattgaaaaactacgcaacaaggtgcaattgcttttgctaaacctgcatcccatatttgacaacaaccgacccgtgccgcccagcgtgcagtatcttggcggaggaatccatcttgtaaagagcgcgccgttgaccaaattaagtccggtcatcaacgcgcaaatgaacaagtcaaaaagcggaacgatttacgtaagttttgggtcgagcattgacaccaaatcgtttgcaaacgagtttctttacatgttaatcaatacgttcaaaacgttggataattacaccatattatggaaaattgacgacgaagtagtaaaaaacataacgttgcccgccaacgtaatcacgcaaaattggtttaatcaacgcgccgtgctgcgtcataaaaaaatggcggcgtttattacgcaaggcggactacaatcgagcgacgaggccttggaagccgggatacccatggtgtgtctgcccatgatgggcgaccagttttaccatgcgcacaaattacagcaactcggcgtagcccgcgccttggacactgttaccgtttccagcgatcaactactagtggcgataaacgacgtgttgtttaacgcgcctacctacaaaaaacacatggccgagttatatgcgctcatcaatcatgataaagcaacgtttccgcctctagataaagccatcaaattcacagaacgcgtaattcgatatagacatgacatcagtcgtcaattgtattcattaaaaacaacagctgccaatgtaccgtattcaaattactacatgtataaatctgtgttttctattgtaatgaatcacttaacacacttttaattacgtcaataaatgttattcaccattatttacctggtttttttgagaggggctttgtgcgactgcgcacttccagcctttataaacgctcaccaaccaaagcaggtcattattgtgccaggacgttcaaaggcgaaacatcgaaatggagtctgttcaaacgcgcttatgtgccagtagcaatcaatttgctccgttcaaaaagcgccagcttgccgtgccggtcggttctgtgaacagtttgacacacaccatcacctccaccaccgtcaccagcgtgattccaaaaaattatcaagaaaaacgtcagaaaatatgccacataatatcttcgttgcgtaacacgcacttgaatttcaataagatacagtctgtacataaaaagaaactgcggcatttgcaaaatttgctaagaaaaaagaacgaaattattgccgagttggttagaaaacttgaaagtgcacagaagaagacaacgcacagaaatattagtaaaccagctcattggaaatactttggagtagtcagatgtgacaacacaattcgcacaattattggcaacgaaaagtttgtaaggagacgtttggccgagctgtgcacattgtacaacgccgagtacgtgttttgccaagcacgcgccgatggagacaaagatcgacaggcactagcgagtctgctgacggcggcgtttggttcgcgagtcatagtttatgaaaatagtcgccggttcgagtttataaatccggacgagattgctagtggtaaacgtttaataattaaacatttgcaagatgaatctcaaagtgatattaacgcctattaatttgaaaggtgaggaagagcccaattgcgttgagcgcattaccataatgccatgtattttaatagatactgagatctgtttaaatgtcagatgccgttctccttttgccaaattcaaagtattgattattgtagatggctttgatagcgcttatattcaggctaccttttgtagcattagcgatagtgtaacaattgttaacaaatctaacgaaaagcatgtaacgtttgacgggtttgtaaggccggacgatgaaggtacaacaatgccttatgtcattggaccattatattctgtcgacgctgctgtcgccgaccgtaaagtgaaggacgtggtggattcaattcaaaaccaacagacaatgttaaaagtatttattaacgaggctaatgtgtataacaaatggaatatgcttaaaggtttaatttataataataacaatgaatctgttttagtaaaataatgtagtaaaatttataaaggtagataaaaattataatattaataaaaaaaataatgttactaaatgggttcctgcgttaaattattttacgggtagacagctattaactattttatttatttttaaatttaaataaatgtattgttagaaaattgtgttgttttattagtataacgaaaaaatacatgacataaaccgcttccaattttggtcacacaaactcttgtgtggatagtttacgtaatgagttaaataggcgggcagttgtccgctaaacgtgtcggtggtcaagtagatgtgcattaatttacgacaacccaaagcggggccgcttatgtcaagtatttttttcacaaaattggtaatggtttcgttttgttccttgtacaaacacatgtcggtgtgatcgttgacgcacgagttgtacgattccgccggcaggttggcaaacaagcgcttgagatgcttgagtctgcgttcaattttataatcaaacttgttggtgaaaatgtctttcagcaagcacattaactggtcgttcaaaacgcgctgcaacgacgacaccaacacatgatattcgtttccaaaaagcgaaaaatttttgatgcagcggtccgcgttgaagggtcgtttcataatgcgcacgttgacaaaaaacacgttgaaagacagcggggctgtggttattttaacgccgttgtcggtatactcgtcgacgccgtctgcgcttgttatgtcaatttgtagcgcaaatctaaccaaatcaaactcatcgttgtactgtgtctttatgcattttatatggcggtttaagtgcaagttgatttggccgtttaatctataggctccgttttgataacatttcagcactaccaacggatccgacatgtaaacttgacgcgttagcacgtccaattcagcgtaatgttggtcgacgcatttttgtaaattagtttgcaggttgcaaaacatttttgcgcaaaagccgtaatagtcaaaatctatgcattttaatgcgcttctgtcgtcgtcaatatggcatgtcacggctgcgcctccagttaacacgaataaaccgccgttttcgcaaactacggcttcgaaacaatctttgataaatgccaactttgctttagccacaattttatcgcgcaggcgatcttcaatatcctttgtcgtaatataaggtaggacgccaagatttagttgattcaacaaacgttccataatgaatagcggcgacgcaacacgactacactgttcaaatgcgcacgcaaaacaaacccttgcaactttatttgccaatcgtaatcacagtagtttttacgagtacgccatcgcgtttgtaagcacattgctttttaaaaataatttaaatttaatgaccgcgtgcaatttgatcaactcgttgatcaactttgaactcaacatgtttggtaaaagtttattgctaaatggatttgttaatttctgcattgctaacagcgacggggttacgattcaacataaaatgttaaccaacgtgttaagttttttgttggaaaaatattattaaaaataaataaataaacttgttcagttctaattattgttttattttttataaaataatacaattttatttatacattaatactttggtatttattaatacaattatttacaatactttatttacactataatactttatttacattagtactaaattaatactaaattacgctaatactaaattaatactttatataatcaaaaataatactttatataatactttctaatcatcataaacgggtaatagttttttctcttgaaatttacgctgcaactcttcgctaaaacacatgggcggtggagtgggagcgggtggagtaggagtccttacgggtttgatgggcgacagttctctggacttgcggaacagcttgggcgaaaacgtcggcgtgcgccgactaatgatttcttcatcgcacgaggcgtcgcacattgtgcacgcgtccggtgaggtacacaaaactttcttgggcacgctgtacaccggcttgggcacgctatatgtgttgccaaaactagaactcgttgtggttgccgaacggagacgatgggtgtgaagacggcgatggctgtgaagacaagtccgaaggcgcgataaaagatgaaagtgtttctgaaaccgaagtggtggtagaagtggtagaaggcgggtgcgttacggcaaccacgctgctgctatttctgccttcggagaccacttccagcaatctagagttactctctcgttcttcgcggcgatagtcaatgtcgcaataatgttcataagatgccttttcggcttcggcgcgccttttcatgtatatgttgtgacgcatctcctttaactgcacgtacaaattccagcattgcacagccagtatcgtaagcacgcccattatgattacgggataattttgattaaacacggtcggctcgtgatcgcttacaatcgctcggcacatgatgcattttttgtaaatgttcacatacacacagttttggctcaaggtttcggtatttgcgtagtcaatttccagatacacgatagagttccagcacattgattccaaatcgtagtgacgatataaaacatctagcgccggtagatgaccatttttgaacacgtagatttgaaacgcggcaaacagcatccaacacagcccagtgatcacgtttaccataatacacgtgatagcgacgtaaaagttttctttcgcattgaaatttacatttgtgtttgaagagctgctgcgatttttcgtccacacgataatcttccatataaaataaaacatgtaaaataatatccacatgccgaacgccagcattatcggtatagatagattgataaccgattgctttccttcaatttccagcaaaaacgcgtatctgctgtctatcactcccattatagataacacaaacactatcagatatgctaataataatgaggcattaagcccgaattgtaaaactgcagtgattttatttaacattttgaatatttaattcaacaactaagtaatggcaatatgtatcgagtactgatcgtgtttttcctgttcgtgtttctttatatagtgtaccagcccttttatcaggcatacttgcatatcggacatgcccaacaagattacaatgacacgttggacgataggatggattacattgaatccgtaatgcgtagaaggcactacgtgccgattgaagcgttgcccgcaatcaggtttgatactaatctcggcacgttggccggtgacacgattaaatgcatgtcggtgcctttgtttgttagtgacattgacctgccgatgtttgattgtagtcagatatgcgataacccgtctgcggcgtatttctttgtcaacgaaacggatgtgtttgtggtcaacggccacagactgacggtgggcggatactgctccactaatagtttgccccgcaactgtaatcgcgagacgagcgtcattttaatgagtctcaatcagtggacgtgcatagccgaggacccgcgttactatgcgggcacagataacatgacgcaactcgcaggcagacaacactttgaccgcattatgcccggacagagtgataggaacgtcctgtttgaccgattactaggccgagaggtgaacgtgaccactaacacgtttcgccgcagctgggacgagttgctggaggacggcactaggcggttcgaaatgcgctgcaacgcccgagataacaacaataatctcatgtttgttaatccgcttaatcccctcgagtgtctcccgaacgtgtgcactaacgttagcaacgtgcacaccagtgttagacccgtatttgaaacgggagagtgtgactgcggcgacgaagcggtcacgcgtgttacgcacattgtgccgggggacaggacctctatgtgtgccagcattatagatggcctggataaaagtacggcatcatatagatatcgcgtagagtgcgttaatctgtacacctctattctaaattattctaataacaaattgttatgtcccagtgacacttttgatagtaacacggacgcagcttttgcctttgaagtgcccggctcctaccctttatcgcgcaacggcatcaacgagccaacttatcgcttttatcttgataccagatctcgagttaattacaatgacgtcagagggcagttatcttaattgtgataacacaaacaataagtcatttaaatgttacgtcagtagttagtatataagccgtacatgttggcttgcaaattcagtcaatatcaggcttttatcatggacggtgtaaagctgctagggacgtgcgcgctaataattttgttatcgacgacgagtacagttgtcgggcgtgaccgtatcacgtttacgccgatagaagatagcgcaggcctcatgtttgaacgcatgtacggcttgcgacatcatacagacgacagatttgtgtttgtgaaaaaattcaattttgtttcggtgctgcaagagctcaataatatcaaatctaaaattgaattatatgaagcgcaagtttcaacttgcacaaacgtcagacaaataaaacagaacagatcgagtatcatcaaagctcgcattgaaaatcagctgcagtttttgacgcaactaaacaaaaatctcatcacatactctgtggaaagcagcattttaagcaacgacgtgctggacaacatcgatctggaatatgacgacagcggtgagtttgacgtttacgacgaatacgaacagccttcgcattggagcaacatgactgtatccgacgcgcaagctttgctccgaaacccgcccaaagacagagtaatgtttttggacacggttaccaccagcgacgtgagcagcaaatacgaagaatacataaactgcattgtgagcaaccgtaccgttgaaaacgagtgcatgtttttagccaacatgatgaacgtgctcaacgacaaattggacgacgcagcagctttggccaagatgctggagcgaatagtaaaacaaacgcgaaagaacaaactcaacatctccaacacggttatagacgacgacacgctgctaacggaaatgaaaaaattaacacaaactttatacaaccaaaaccgcgtgtgggtagtggattttaacaaggacatgaatagttatttcgatttgtcgcaagcgtataaattgcatttatatgttgatttaaacacggtcattatgtttattaccatgccattgttaaaatccaccgccgtttcgtttaatttgtatcgcgtcatgacggtgcctttttgcaggggcaaaatgtgtctgcttatcatttcgggcaatgaatactttgggattacagacagcaaaaactattatgtgcccgtatctgataactttagacaagattgccaagagtttacgggctacaatgagtttttgtgtcccgaaactgagccgattgccactatgaactcgaaagtgtgcgagattgaaatgtttatgggtcgatatagcgacgacgtggacaacatgtgcgacattagggtggccaattataatcccaaaaaagcttacgtgaacactttaatagactaccgaaaatggttgtacatttttccaaacacgaccgtgtccgtccactattattgtcacgacgcgcttgtagaagttgatacaaaagtttcgcccggcgttggtgttatgttttcgactatggcgcaaacgtgttcgattagaataacgtatgatgtgaccataactgtagattcgcgattttatgtcagccattcaactacatactggcctaaaaagaaatttaattttaacaactacatcgaccaaatgttgcttgaaaaagcgaccaccagttttataccgactgttgacaattttacccggcccgttttattgcaacttcctcataaatttcacattaaagattacacatcgacgccccatcattttttccatcagtctaaaatttacaccaacagcgcggcgcccgacgaagactcgcaagacgacagtaataccaccgtggttattatcgctattgtcgctgcaatgatcctattctgtggattattgttatttttgttttgctgtataaaaaaacggtgtcatcaatcaaataacgtggttgtgcaatacaaaaataacaatgaatttgtcacaatttgcaataatttagaagacaatcgagcatacattaatttacctaatgaatacgatagcgatgatatgccaaaaccattgtaccctttacttggctttaatgatgatttgttaaaagatgataaacctgtgttgtaccctatgattatagaaagaataaaataaaacatgtataattgaaataaatatattatttaataaaatgttttttatttatatactattttctattacatattccaatgcacacaaatgtttaatggctatcagttttaattttactaattcgtctaaacaaaaattattcacttgctgtttttcatccatttgacatatggcgtttataaataattcgctgtgttttatgaacgaatcgtaaaccgctgcctgggccttcagcacggtcggcgcattgtatttttgggtaaagtacgcaatatttttagtcaaacacagagattttaaatctttttcatttatatccaagtcggaacaatcgtatacaaaatctagcttttcactttcgggcgcgcccagatactggtttacgagttcgagctgctccacttggcctttgatatcggccgctatgcacaacattttgtcgattgcagtttcattgtttttaacataataatttttaacttttttattttgcaatttaatcaaactatttaaattcgcttgacctttcttacaaagcgcagttaatatgcaagacattttgacttataataaaaaacaaaacttttatatattcatttattgttcaataataacaaatattccaggcttaaaagctaacgaatagggcttttcggtaattttcttattattcatgtccgtcatctgcatctctttgccgtacttgacgccgtcaatggtgcccatcatgtacattttaatctcctccgaaggtccgtctattttgtccatttcgaacaatctatcaaaatcttcaacgctcattctctgcatatcaagaggaacgtttctgatctttccggtggcgtaaattgatccgttgttgtcacggttgattatgtaaaaccgacgaatcaacatgtcgcgctcgctagttttgttcttatccggcaaatgaatgcacacgtttggttccatcttcaaaggaaaatcgctttgcaagtgtttttgcaaaatgttgccaaatatattgttgtgtttgtgaatgtctccgtattgaatgctaaaaaactggccaaagttgcttttggcacgttttatggttccaaagtcggaaaaccaaaatccgcagggcttgccctgcactcttggaccgatggtgtacgtagtcttgccgttggccggctccaacaccacgatatttttatcgggctcgggatacaacttgtcttcccattcgtgcaaactgttcaaattagacagtcgacaaaattcgtttttcaaaaatctgccttcgaaacaactacaattcagtattgaaaagttgcctcgtttcacattaatcgccatctgctcctgccacaacatcttcgtcaactcgtgtggctccaattgaatggacgacggcgtaaaatagcacattacgcccgtttcgtcgtgtttcacgttaaaagcgccgctgttgtacggcaccagctgctggtcctcaccaccttccgatctttcccgcttcggctggttgtcgtcgctgctcgaatatccatcgccaatcttgcgtttagttgccatgctaccgacgtgcgctgtctgctgtggttcaagtctaattgaagtgtttcacagaatataagatatataataaatatggacgactctgttgccagcatgtgcgtagacaacgcgtttgcgtacactactgacgatttattgaaaaatattccttttagtcattccaaatgcgcccctttcaagctacaaaattacaccgttttgaagcggttgagcaacgggtttatcgacaagtatgtggacgtgtgctctatcagcgagttgcaaaagtttaattttaagatagatcggctaaccaactacatatcaaacattttcgagtacgagtttgtagttttagaacacgatttgtccacagtgcacgtcattaacgccgaaacaaaaaccaaactgggccatataaacgtgtcgctaaaccaaaacgacgcaaacgtgctcattttgaccgtaactttaacgagctaaaatgaacgaggacacgcccccgttttattttatcagcgtgtgtgacaactttcgcgacaacaccgccgaacacgtattcgacatgttaatagaaagacatagttcgtttgaaaattatcccattgaaaacacggcgtttattaacagcttgatcgttaacgggtttaaatacaatcaagttgacgatcacgttgtgtgcgagtattgcgaagcagaaataaaaaattggtccgaagacgagtgtattgaatatgcacacgtaaccttgtcgccgtattgcgcgtatgctaacaagatcgccgagcgtgaatcgtttggcgacaacattaccatcaacgctgtactagtgaaagaaggcaaacccaagtgtgtgtacagatgcatgtccaatttacagtcgcgtatggatacgtttgttaacttttggcctgccgcattgcgtgacatgattacaaacattgcggaagcgggacttttttacacgggtcgcggagacgaaactgtgtgtttcttttgcgactgttgcgtacgtgattggcatactaatgaagacacctggcagcgacacgccgccgaaaacccgcaatgttattttgtattgtcggtgaaaggtaaagaattttgtcaaaactcaattactgtcactcacgttgataaacgtgacgacgacaatttaaacgaaaacgccgacgacattgaggaaaaatatgaatgcaaagtctgtctcgaacgccaacgcgacgccgtgcttatgccgtgtcggcatttttgcgtttgcgttcagtgttattttggattagatcaaaagtgtccgacgtgtcgtcaggacgtcaccgattttataaaaatatttgtggtgtaataaaatggtgttcaacgtgtactacaacggctattatgtggaaaaaaaattctccaaggagtttttaattcatattgcgcctgatttgaaaaacagcgtcgactggaacggcagcacgcgcaaacagctgcgcgttctagacaagcgcgcctacaggcaggtgttgcactgcaacggcagatactactggcccgatggcacaaagtttgtctctcatccgtacaacaaatctattcgcacgcacagcgcaacagtcaaacggaccgacagctcgcatcgattaaaaagccacgtggtcgacaaacgaccgcgccgctctttagattctcctcgcttggacggatatgttttggcatcgtcgcccataccacacagcgactggaatgaagaactaaagctgtacgcccagagccacggctacgacgactacgacgacaatttagaagatggcgaaatcgacgaacgtgactctttaaaaagtttaaataatcatctagacgacttgaatgtattagaaaaacaataaaacatgtattaaaaataataataataaaactatattttgtaatatataatgtattttatttaaaaattgtctattccgtagttgagaaagttttgtcttgacttcataactctcttctccatattctgcagctcgtttacgttttttgtgacgcttttaattttctcaaaatgctggctgtcaatagttattttttgcttttgtctattaatttcttccaattgagattttaaatctcgctgagattgagatgcgttgtaattccttgagaacatcttgagaaaacatacagatgaggtaaaacagcatcttttatccaaattaggagttaattattattcatttgtatcgcgaccatttgctcgtacacatcttccataaaatggttatttttattgcgataagtgttggcattgacattttgcaaatgtcgtaggttaaaggggcaaatgggctgcgtggccgataaaagattccagttcaacaatccctcttcgcccccgtttaacttgaaaatggcgctacacgtttctacgctatcgtgttcctgttgagtggcgcacggttcgaccagtatcatcttgtgatatgcggttttgacattcatgtgcaacggaataacttgcgggtcatcgcattcgtcggaattaagctttaaatggcgtccgtatgctttccaaagtttttcgtcgtcgaaccgcggcactgcttgcaagtcgacgcggggaaacggcgctctgtacaaaacgcctaaattcaaaaactgattgcattgttgcagctctgtccaatcgacgcgatttttgtaattttgaaacagcatcaggttgaacgccgcgctggcgcgcacgtttgtaatcactgtgtaattgatcagcttgtgccaatactgggcattgaaattttcttcaaactcatttctaaactctggatgcgcaaacatgtgtctaatgtagtacgcgggcggggcgttgaacgcagtccatttgtcaatacacttccagtctgaatgtaacgtgttcaccaaaccgggatattcgtcaaacacgagcatgtgatccgaccacggtatgctgtgggcgatcaattttagttcttgcacgcggccttcgcgtaagcaatacaaaatgagcgcgtcgctgatcttgacacagtcttgcatgtacgcggacaaattaacgttttccatacagctcacattgtttattagcgccgtgttcaagtgtttgtatttggacacataatcgtagttgatgtactgtttaatgggttcttgaaaccattcttttagtagtatgtgactggccactatgcgtttccaatttaatttgtgtgcgtatttttgctgcaccgacaacgagaggttattgtaatttttggatatttcttccatgtccaacaagtccccaaacgcgagtataaaatcttgcgtcaaaaatttttgctcagacaccaacgaccagatcaaatgtgatttaaacctgttggcgattgttatcgacaacggcgaaattgaaataattttccaatccaacttgttgcgaaacacgtgaataaaatcgacgcgtccgtaacattcgcgcgatatgcgcttccaaaacgtgtcatcttgcaaattaagcaaatagacacgattgttgggagatttgacggccaattcaattatttttatatattctttttgctttaaagcgcgttgtagcacttgggttggagccatgtcgactgaagctccacgctgtttgaagcaaggtgaccgttttggtcggcatgttcaaacgtcgattacatgtttgctttgcatcaaaatggcgtaattaattaagaaacaacatgaaagccatctgcatcattagcggcgatgttcatggaaaaatttattttcaacaagaatcagcgaatcaaccgcttaaaattagcggctatttgttaaatttgcctcgaggtttgcacggctttcacgtgcacgaatatggcgacacgagcaacggttgcacgtcggccggtgagcactttaatcccaccaatgaggaccacggcgctcccgatgctgaaattaggcatgttggcgacttgggcaacataaaatcggctggctacaattcactgaccgaagtaaacatgatggacaacgttatgtctctatatggcccgcataatattatcggaagaagtttggtcgtgcacacggacaaagacgatttgggccttaccgatcatccgttgagcaaaacaaccggcaattctggcggccgtttgggatgcggaataattgccatatgtaaatgatgtcatcgttctaactcgctttacgagtagaattctacgtgtaaaacataatcaagagatgatgtcatttgtttttcaaaactgaactcaagaaatgatgtcatttgtttttcaaaactgaactggctttacgagtagaattctacttgtaacgcatgatcaagggatgatgtcatttgtttttcaaaaccgaactcgctttacgagtagaattctacttgtaaaacataatcgaaagatgatgtcatttgttttttaaaattgaactggctttacgagtagaattctacttgtaaaacacaatcgagagatgatgtcatattttgcacacggctctaattaaactcgctttacgagtaaaattctacttgtaacgcatgatcaagggatgatgtattggatgagtcatttgtttttcaaaactaaactcgctttacgagtagaattctacttgtaacgcacgcccaagggatgatgtcatttatttgtgcaaagctgatgtcatcttttgcacacgattataaacacaatcaaataatgactcatttgtttttcaaaactgaactcgctttacgagtagaattctacttgtaaaacacaatcaagcgatgatgtcattttaaaaatgatgtcatttgtttttcaaaactaaactcgctttacgagtagaattctacgtgtaaaacacaatcaagggatgatgtcatttactaaaataaaataattatttaaataaaaatgtttttattgtaaaatacacattgattacacgtgacatttacgatggcgaacaataatttcactttttatattaggacacgacgtgtatataggaaagcttaagcgtttcaataaagccatggcgtacacgctaagcttgcccagcttgcggctctttgaaatctgtagttttcggggagtaccgtcgttcttcagtgccacatacgtcaacttgcgatcgtacactttataatacgtgttgtagttatttttttccagaaattccctcataaagcaatccttggataaagtttttgatccgtacagttggccacaccggtccatgcacaggtacacacacgtgatggcgttttgaatgacgatgcgatttctgtcaacggcaacgcgcttgaatatggtgtcgacgttgtccgattcaatggttccgtaaacagctccgtctggatttactgccaaaaactgccggttaataaacagctggccgggaatagacgtgcccgtgatgtgtgtcagcagagctgagcagtcagccatagaggctagagctacaagtgccagcaagcgatacatgatgaactttaagtccccacagcaaactggcgcttttatataaaaatttgggccatttttggcgattagataatttttgaagattagataatattgagattagttaataatttgtgtgattagataactttttagggtattgcgcattataaatcaaggtcgagttgtataaactgctctggcgtgtaaaactgcagacttaagttttttgcaaacactcggtctgaatcgctaaaatctttctgaccggtggttagattaattcggccagccgcgtcgcccacataaaaagattgttccttgtcaatatgcgtaaactgtttggccatctcgcgccacattcccgtgtcgggctttcgatgctcatccttgttgggcgacacataaaacgatatgggcacgccagtagcttttttaatattctctaatttatataataaatcgctcgctttgattttgccggaacctaaatgggcttggttcgtaaaaacaactaaatcgtagcctaattcgtacaaacgctttagcttgtgtgcgcacggaaggagctgccagtcgtctgggttttttggaaatttggaccgtgtctttgagctaattagcgtgccgtccaaatcaaaagccgcaattttggttcttttagcgccgtcatgaaccgcgtacgcatacaaatcgggctgctgtaacgtccacatggtgaatgcatcttactcaaagtccatcaattcgtacgcgtttgtgtccaggtcgggcgttgaaaaattgtagcttgccattagatcggatagcgattcaaattttgtaagcgtttgtagcgcacgtttggcatcttgtttaaaattacacgacgacagacagtaaaaatattcctcgataagcatgactacacccatatcactgtttaagtgctcgacgtagttgttgcatgttatgtcgcgtgtgccgcgatacgcgtgatttcggtgaaaatcacaccacaaccagtcggcgtgcgtgtaacaaagtcgacagcgaaacaatttatcgttttccaaaaaatttaaatactcgacagttttgcagcttagattccgcgtttgattcaccttaaaatcgtcgtcagcctctataatctcgggcaacagcttgccttgttgccccatcgtatcgatcacctcccccaagtggcccggtgttatattaagtcgtttaaaatcatttattgcttcctgcacgtcggcctggtaatttttgaccacgggcgtggaaatcaattgccgttgaagggaaataattcgtggtgtgggtatcggccgcctgttgcacaattccaccagcggtggaggcaagggcgcattcacagcaaccgttgtcatttataagtaatagtgtaaaaatgcaaatattcatcaaaacattgacgggcaaaaccattaccgccgaaacggaacccgcagagacggtggccgatcttaagcaaaaaattgccgataaagaaggtgtgcccgtagatcaacaaagacttatctttgcgggcaaacaactggaagattccaaaactatggccgattacaatattcagaaggaatctactcttcacatggtgttacgattacgaggagggtattaataataacaataataaaaaccattaaatatacataaaagttttttatttaatctgacatatttgtatcttgtgtattatcgctaaccattaaaagtgctggagccacagtgttgcggcgagtctttatagaagatcgttgtttggctggaactgagcttttccttttcctgctgccgctaatgggagtgggcacgtactctgtagtagacggtgcaacgggcaacttgagcgctaccgtcttaaatttggccatacttttagtgatgaaatcgcgcgttaacacttcgtcgtaaatgttacttagcagaggcgcaacattgtgattaaatgtctcgtttaacaagctgtaaaactccgaataaagcttatcgcgcatttcgcagctctccttcaattctgccaaatttgcgttggtaagcaccacagtctgtctttttttgctcgctggaattgctgcgttctcgcttgaagacgacgatgtcgatcggtcggccatttttttgcccagcttttcagtgtgatcaaaaatgaacacaaaatctgccaattcgggcttgtttttcaccaaatcccacatggccgggctactaggccactcgggctgcttgatcttagtgtaccaactgttaaacaaaatgtatttattgttgttaatcactttcttcttgcgtttggacattttgcgttcgtcttgcatgacaggcaccacgttaaggatatagttaatgttctttctttccaagaaatttacaataacggccagctggtccatgttggatttgttgtaagagctcgattccagtttattcaacagcttttcatttttgcacacggccgcagtctccggagattgttgctccggcacgtttaccatgtttgcttcttgtaaacctttgaaacaacccgtttgtattcttgatgatatatttttttaatgcccaacaacctggcaattcgtttgtgatgaagacacaccttacgcttcgaacatttgtcggtgattactgtgaaatggcctaaattagctcttatatattcttttatacgctcaaacgacacgatgtccaacatgtgcgcgcagacgttttctgtgttcatcgtgtgcttgagcgtgttgatggcttccctgaacagcgcttgtatttcgctgcgagtcaagcagtccgaatcacacccgcctaagtgcgtgcaatttttggggggcatcgttgtctatctttttcagagtggcgtagaaaaagtcctgcaattgcctattatcaaaacgcgccttgacgctgcgcacaaaatcaaaaaattcaatgtaattgctgtaatcgtacgtgatcagttgtttgtcgttcatataattaaagtatttgttgagcggcacgatggccaggctgcgcgctatttcgcaattgaagcgtcgcggttttaacattatacggtagtcattgccaaacgtgcccggcaacaacttcacggtgtacgtgttgggtttggcgttcacgttaatcaagttgccgcgcacgacgcctacgtatatcaaatacttgtaggtgacgccgtcatctttccattgtaacgtaaatggcaacttgtagatgaacgcgctgtcaaaaaaccggccagtttcttccacaaactcgcgcacggctgtctcgtaaacttttgcgtcgcaacaatcgcgatgacctcgtggtatggaaattttttctaaaaaagtgtcgttcatgtcggcggcgggcgcgttcgcgctccggtacgcgcgacgggcacacagcaggacagccttgtccggctcgattatcataaacaatcctgcagcgtttcgcattttacatatttgacacttaaaaaattgcgcacacgagcaccatcgtttgatacctaattgcaactatttacaatttatcagtttacgttgaacccgttttaattttttagatccgtccttgttcagttgcaagttgactaaatgacaaaatttttcggttctgcaaaaccgcccttgtctgttccacccgttgtatttgaaaaaactttttttcacgcggcgacaactgcttgtataatattgcccaatgtaaacatgcaaaattttgttactctcgtcaaaacagcggttggcgttccattccataatttttttattatttatcaacgatggccattgtaaattgtcgtcatttatacgcatcatatgatttaacaaaagcttttcgtatagcggaacttcaattcccttggaacatttttcaaacgataatttaatttgtttctcggttggcagcatttcatgcttgattaacaatcgcctgacttttatagccacgtttatgtctttgcacagcaaatgtgggttgtcgacaatgtaatagtgcaaagcatttgttacggcaaatgcgtagtttgatttgacgacgccctttttcttgacgggcattgcggcttttaaaattacttgcaagcattgtacgaatacctctttgtgtttaaacaataatatggacaaacatcggcgaaacaatttgtaataattatgaaatcccaaattgcaggttttaaacttctttgttacttgttttataataaataaaatttgctgacccatgtctgcgcccacaactttaattaaccatttgtgcgcatattgattgtctcgttgttcccaaccggaaaattgattgatctcgagccaccggcattggtcgtttgataccgtcgttaacgccgacgctcctgcctgtttgattacgggttctaaaagacgaaacagcagcgtaaatttgtttttgcgtcggtagtattttggcaggcaataatcaaaaaaatccgtaagcaattctctgcatctattaatattcgttgcgtacgaatcgagtttttcaaaaattactttgtttgtatgaaaataacgtttgggcttctcacaataataatcttcgttgtagaacagaaacggtttgcgagaattggcacgtttgtccatgattggctcagtgtaacgattgattcaaatcaaaattgacaacacgtttgccgtaatgtgcaccggttcgcacacgtttgccgcgtatgtaatccatgtttatttcgctgtcgcaattgattacacgattgtgttgggcggcgcgttttattgaatttaggcgacgcgtcgacaactccaaaggattgtaaagcgcagatttttccagagtaaacgagtttaagtggccaccgttgaaccattccagagccacgattgtgtacagcaaaaagaatatttctttgtcgacgttttcaaacgcaaacttgttttttaggcaatagtagtaaaattttaacgaattgtataaataaaacataaaattgccatttttaaagtaaaattctacatccgtgacgaacaaaaggtttactattttgttctccaacaagtgtgccaattttcttaagtacaccattgaatttttgtcgtcgtccatctcgatcaacaacacgtacggcgttttggaatttaaaattattctaaaattttcctgttgcaacgattccacagcgtccgaccaatatgacgctgccacctctagacagatgtatttcttggaaaacacgtgtcgtttgataacctcgctgatggacgtgatcgattgtaaatacttttcaaacgtcgcgtcttcccaaccacgcaccgaaacgggcgctgtcgtgtcgggctgatgtttgaaatccaaaccactctgaattaacttggttgtgattcgtatgctcaactgttgacccaacgtgtagtgatcttcgtaggcgcgctcccacatcacgttacacacaaatttgacgagatcatcaacgtctttctgttgcaaaattcgccgcaaacgcgccacatcgcccttgtaccaccgatctcggcacacaagctgtagcatttttaaatcgtgatcgctcaagctattaattctggttagatttatatagtcgtcaatatcctcgggcgtggtttgcgtcatgtctgtaaaacgtgcaaaatcaaacatttttatgttgtagtcgaatctaacaaatccatcggcgttcacttgcacttcgcgctttacaaaacgaggtagcgtgtaatcgaacccgtttaaatagattgcgtacaaaaccagcacttcatcttccagtttgcacgcttgcggcaaaaattgtgtggtgtgctccaaccgggtgacaaacatgactatggaaaataacgcggaattcaacagacgactagagtacgtgggcacgatcgccacaatgatgaaacgaacattgaacgttttacgacagcagggctattgcacgcaacaggatgcggattctttgtgcgtgtcagacgacacggcggcctggttatgcggccgtttgccgacctgcaattttgtatcgttccgcgtgcacatcgaccagtttgagcatccaaatccggcgttggaatattttaaatttgaagaaagtctggcgcaacgccaacacgtgggcccgcgttacacgtacatgaattacacgctttttaaaaacgtcgtggccctcaaattggtcgtgtacacgcgcacgctacaagctaacatgtacgcggacgggttgccgtattttgtgcaaaatttttcagaaacaagctacaaacatgttcgtgtgtatgttagaaaacttggtgcgatacaagtagcgacattatcagtttacgaacaaattattgaagatacaataaatgaactcgtcgtcaatcacgttgattagataatgtccgtgttaaatgtgatatcttagattacgagcgcgcaataaccatagtttaatcgaagagaatagccgtcgccacaatggataattacaaattgcaattgcaagaattttttgaccaagcgcccgacaacgacgatcccaactttgaacatcaaacgcccaatctattggcgcatcagaaaaaaggcatacagtggatgattaacagagaaaaaaacggccggcccaacggcggcgtgcttgccgacgacatgggactcggcaaaacgctctctgtgctaatgttaatcgcaaaaaacaactctctacaattgaaaactctaatagtgtgtcctttgtctttaatcaatcattgggtaaccgaaaacaagaagcatgatttaaattttaacattttaaagtattacaaatctttggatgccgacacggttgagcattaccacattgtggtgaccacgtacgacgttttattggcacatttcaaattgatcaaacaaaataaacagtcaagtctgttttcaacccgctggcatcgagttgttctagatgaagcgcatattatcaaaaactgcaagacgggcgtgcacaacgccgcgtgcgctttgaccgcaacaaaccgatggtgcattaccggcacaccgatccacaacaagcattgggacatgtactcgatgattaattttttgcaatgtcgtccttttaacaatccaagagtgtggaaaatgttaaataaaaacaacgactctacaaatcgcataaaaagtattattaaaaaaattgttttaaaacgcgacaaatctgaaatttcttctaacattcctaaacacacggttgagtatgtacatgttaattttaatgaagaagaaaaaacgttgtacgataaattaaagtgtgaatcggaagaggcgtatgtgaaggctgtggcagcgcgtgaaaacgaaaacgcactaagccgattgcagcaaatgcagcacgtgttatggctaatactgaaattgaggcaaatctgctgccacccgtatttggccatgcacggtaaaaatattttggaaacaaacgactgttttaaaatggattatatgagcagcaagtgcaaacgagtgctcgacttggtagacgacattttgaacacaagcaacgacaagataatattggtttcgcaatgggtggaatatttaaaaatatttgaaaacttttttaaacaaaaaaacattgctacgttaatgtacacgggccaattaaaagtggaagacaggattttggccgagacgacattcaatgatgctgccaatactcaacatcgaattttgctgctttccattaagtgcggcggcgtcgggttaaacttaataggcggaaaccacattgtaatgttggagcctcattggaacccgcaaattgaattgcaggcgcaagaccgaatcagtcgtatgggacaaacaaaaaacacgtacgtgtacaagatgctaaatgtggaagacaacagcatcgaaaaatacattaaacaacgccaagacaaaaagattgcgtttgtcaacacggtctttgaagagactctgctcaattacgaagacattaaaaaatttttcaacttgtagctggtaagtcgtcatgaacacccgatatgctacttgctatgtttgcgacgagttggtgtacttgtttaagaaaacgtttagtaacatgtccccttcggccgctgcgttttaccaacggcgcatggccattgttaaaaacggtatcgtgctgtgcccacgttgttcgtcggaactaaaaattggcaacggcgtttcgattccaatttacccccaccgcgctcaacaacatgcacgacggtcgcgttaagacgcaagcgcttcgagttttggcccgctcgctacctccgctgtacgactcgaccgtcgatcgacacggctgcaaggtgttcacggtgcggcgctacaacagacgcgtaatcgactttgcgggcattcgcaacaaaacgctggaaatcattaaaacggatagaaacttgccgctcaacacagaatgcaatgtgaaagttgtcgacagtgcatgcatgcgttgcagaaaaagtttcgcagtttaccccgccgttacctatctgcattgcggacattcgtgtctgtgcaccgactgcgacgaaacggtaaacgtggacaacacgtgtcctaaatgtaaaagcggcattagatataaattaaaatacaaaactttgtaacatgttgccctacgaaatggtgattgccgtgttggtttacttgtcgccggcgcagattctaaatttaaaccttccttttgcataccaaaaaagtgtgctgtttgccagcaactctgcaaaagttaacgaacgcatcaggcggcgagcgcgtgacgacaacgacgacgacccctatttttactacaaacagttcataaagattaattttttaactaaaaaaataataaatgtttataataaaactgaaaagtgtattagagcgacgtttgatggtcggtatgtggttacacgcgacgttttaatgtgctttgtaaacaagagttatatgaagcaattgctgcgcgaggttgacactcgcattacactacagcaacttgttaaaatgtatagtccagaatttggtttttatgtaaatagcaaaattatgtttgtgttaactgaatcggtgttggcgtctatttgtttaaaacactcgttcggcaaatgcgagtggttggacaaaaatataaaaactgtgtgtttacaattaagaaaaatttgtattaataataagcaacattcgacatgtctatcgtattgattattgtcatagttgtaatatttttaatatgttttttgtacctatcaaatagcaataataaaaatgatgccaataaaaacaatgcttttattgatctcaatcccttgccgctcaatgctacaaccgctactactaccactgccgttgctaccaccactaccaacaacaacaacagcatagtggcctttcggcaaaacaacattcaagaactacaaaactttgaacgatggttcaaaaataatctctcatattcgtttagccaaaaagctgaaaaggtggtaaatcccaatagaaattggaacgacaacacggtatttgacaatttgagtccgtggacaagcgttccggactttggtaccgtgtgccacacgctcatagggtattgcgtacgctacaacaacaccagcgacacgttataccagaaccctgaattggcttacaatctcattaacgggctgcgcatcatttgcagcaaactgcccgatccgccgccgcaccaacaagcgccctggggcccggtcgccgattggtaccatttcacaatcacaatgcccgaggtgtttatgaacattaccattgtgctaaacgaaacgcagcattacgacgaagctgcgtccctcacgcgttactggctcggcttgtatctgcccacggccgtcaactcgatgggctggcaccggacggcaggcaactcaatgcgcatgggtgtgccctacacgtacagtcaaatcttgcgcggatattcattggcgcaaattaggcaagagcagggaatacaagaaatcctaaacacgatcgcgtttccgtacgtgactcaaggcaacggcttgcacgtcgattcgatatacatcgatcacattgacgtgcgcgcttacggctatttgataaattcatactttacgtttgcctattacacgtactattttggagacgaggtaatcaacacggtgggtttgacgagagccatcgaaaacgtgggcagtcccgagggagttgtggtgccaggcgtcatgtctcgaaacggcacgttgtactctaacgtgataggcaactttattacgtatccgttggccgtccattcggccgattactccaaagtgttgaccaaactttcaaaaacatattacggttcggttgtgggcgtaacgaataggttggcttactacgaatccgatcccacaaacaacattcaagcgcccctgtggaccatggcgcggcgcatttggaatcggcgcggcagaattatcaactataatgccaacacggtgtcgtttgagtcgggtattattttgcaaagtttgaacggaatcatgcgcatcccgtcgggcaccacgtccacgcagtcgttcagaccgaccattggccaaacggctatagccaaaaccgacacggccggcgccattttggtgtacgccaagtttgcggaaatgaacaatttgcaatttaaatcgtgcacgttgttctacgatcacggcatgttccagctatattacaacattggcgtggaaccaaactcgctcaacaacacaaacgggcgggtgattgtgctaagcagagacacgtcggtcaacaccaacgatttgtcatttgaagcgcaaagaattaacaacaacaactcgtcggaaggcaccacgttcaacggtgtggtctgtcatcgcgttcctatcacaaacatcaacgtgccttctctgaccgttcgaagtcccaattctagcgtcgaactagtcgagcagataattagttttcaaacaatgtacacggccacggcttcggcctgttacaaattaaacgtcgaaggtcattcggattccctgagagcttttagagttaattccgacgaaaacatttatgtaaacgtgggcaacggcgttaaagccctgtttaattatccctgggtaatggtcaaagaaaataacaaagtgtctttcatgtcggctaacgaagacactactataccatttagcgttataatgaattccttcacctctatcggcgaaccagctttgcaatactctccatcaaattgctttgtgtatggaaacggtttcaaattgaacaacagcacgtttgatttacaatttatttttgaaattgtgtaattatatttagggagaatgtgatattcaaaagactgactgttaacacaaaagactgatattgttgttgttacaaaatagataataaaacaaaaaataaattaaatattatttatttattaaactgtttaattttaatgctaacgcgtacaaatcacgctgttccgacgtggacatggaattgcgcagaaaagtcttgatagtgtcgatttcttcgccgtcatccacttccatatatttgatttcttcctcgatttgcatttccaagtttgcgtattcttgcaaataataatctagtcgttgggcgacctcgccaattttaaataatacattatccgacaccaaatgccagcgagtgactgtgcgctccatcatcctggcactttttaatgtgaatattaaaaggttgttgcatatatatcgttaaacgtttatgtttactttcacgttagctcgtttcattgatgtaaacatttagttttataacagcgtcggtaattttattttttaaagtaaacagaccaaaatcaaaggtgtcttcgacaggtacgattattttcccattgacactgttttcgtgcacagatataattttatcaccgtttattattttgcccaaacacacgtactcgtttcttctcaagccaactatttctaaacaattcacttttctattatcgtgtacgcaattaaaagtaaacgaagcgctacaattgtcgtattctattacaattctgcggcatttataaaatttattaatgttgacgcaaattccatgcagcgcatccatttcgtactgcaaatgcggcgcaattaaaaaatttcctcgtcgttgttaacaatcttgggcgctaaaaagcacgccaacacgcccacgtctttaatgcaatattccaatttgaacggcagttcctcggacatgtatattgtcacggtgggcgccaaaggagcggctttagcaaaatgacacaagtaatcgcccgcaaaagtgtgcgttacggtttgctttgctttgagaacggaaaagttttcgttgtccgcgctcatctgcacgtccgccgagccaatgtcgccatttgctctaaactgcagacccttcttggaacacgacacaataatatcgtggtcgaattgcgtcatgtctttgcacacctgcgcaaactcgacgctcgacatgtggacgacgcaatcgtaatcgctatccggaattcccaaatgttccacgtcgatgcacatcaacttgagcgtgtacgtgcagattctattgtcgttgttgaacacgaacgccatcacatcgccctgatcttccgctttcatcagtacagagctgcgctcgttaacgcatttgacaattttacttaaactgtttatggacacgttgagcggcacgttgcggtcacatctatattttttgaaaccctcggcgtgtagttgcaacgacacgagcgcgacatgcgaggtgtccataacctgcatgcttacgcctcgattatcacaatcaaaagtagcgtgcggcagcagatccttaaaagtttccaccagcctcttcaaaactgcgccggttttaaattccgcttcgaacatttttagcagtgattctaattgcagctgctctttgatacaactaattttacgacgacgatgcgagcttttattcaaccgagcgtgcatgtttgcaatcgtgcaagcgttatcaatttttcattatcgtattgttgcacatcaacaggctggacaccacgttgaactcgccgcagttttgcggcaagttggacccgccgcgcatccaatgcaaactttccgacattctgttgcctacgaacgattgattctttgtccattgatcgaagcgagtgccttcgactttttcgtgtccagtgtggcttgttttaataaattctttgaaaatattgtcgggtgtattattaaatagcatgtatggtatgttgaagatgggataacgcttggcgtgcgggtcgtcatgatttccaccgcgcaccacatatttgcgctcaattttatcaaaattggactggcgagacaaaaacgagacgggcgacaggcatatttgggcgtgcgtaccatcttcggccatccactcggtcaggtcttcgctgcggttaaacacacctttctgaccgtgaatgccacatatttttattccttccaaatcgttggtggacgtgactatgactattttaagcataacgttgtcgccgttaaccaccatgctggcgtcgagtttttcaattttttgatttttaatttgtctaaagtaaacgtacactttgtaaacgttaaaattgccgttggtgcacgtttcaattttgtaccgtcggccgtcgtacacccaattaatctttgcgttgctcaccaacacaccggccatgtacagcacaagtccgtcgtctagcgcaacgtaatttttgtcgctactattcgtaaactttactaaacacgactgcttggggccgaccacaagcttgcccttcaatttgttcactttgttgttgtataaacaaatgggcagcgcaatgtgcggaatgtacggatcttcggcggtcatgagtttattgtctcgcaccaacgtccacaatttaaacattttattgttgagcaaaatggacttgtttaccgccacagagtagccatttggtaaacccgatacgcaattttcctctttgtactcaaacacgggcatggcattctttagattggttagggacacaatcaatttgggtacgggcgtggtatgaaataaatgtataaaattacgataataatactgctccaacttggacatgagcgatttgacgtcatcgttttctacgatcgtacactgaataatgggattatagtatatagaatgtttatagtggtattcgtagggtgtcaacaatacgttaatgtcggcttcgttgttcacccgcaacttttttttgatgcatatcattccttcgtgatgattaacgtaaagtattctgtctgtaatcttcaattcgatgggcgccatgtttcttttcatagtgtacacgataaacgacgtgtttgattttaaacattttaaatttgtgggtctatcattaaacgcgatcagcaacgagtcgtcttgaacgtcgttgaggtcgtccacgaacgcgaccagattgtgttttagcaaatattgaaatttttgcgcaaccatttcgtagtccacgttgggcaaacatgcgttgcggcaaaggaaaaactttttgcccgccacggtcatttcgccgtgaaaaaaactgccaataaatttcacaaaatcctttttttgcttcaacattttctggcgcatgctgtcgttggtgattcgcgccacctcgttgccgacgcgatattttaacacgggcaacgaaatttcaatattgttattgctgctgttgtcctgttgattgggaaagactttgcgttgcttgctaaaagttttcgatacgcaatatatgagacgcccgttgactatacaatcgacaatctttttcgactctttgttgtacaagacgctttgaattttacgacgcttgttcgccaccgtgtacgcgtcgtcgtcggccgtcttgtcgagaactcgttgatagttttgcaaaattgtcgaagttaataacagttctatcaaataggcgtgcttgtatacaattttgttggccaaactgtctatagaatagtttatgtcgtgattcataataatttttatgtgttccacgagttgttgcttgtgaagcgtgttgtattcgaagagaaaatcgagcggtttccatttgccgctgttggccagatatgtttccagcacagaatttaaatcttccgtcactacgtaatcgctagcgtacacgtctcgagcaaacaggacgtcgtcttgtttgtcgtaaactagttggattgcgcgattgatgtgcttctcttgatccacgttgccgtacaaaaacatgcgtttgcaatgtttggcgtatagcttgtcgtagaaattgtgcaccaaaacgttgttgttcatcattatgttgggaaaactcaaaaatctgccgtccagcataaaagttccgttaatattgttgtttgcgtcgacatcgtccgtttctctaaattgcttgtctaagcgcgtgccgaatataacgggcacacatttatgcattacgcaactgagctgttcattaagagcgcaacacaaataagacttgcgttcttgaatagcgcaaaaaagcatacgttcattgctgtttgtagcgcaatcaaaagtatattttaatttgtatttattttcaattctatcgtacaactcgttgaaatcttgaaccacgtccgtcatcgtgaagcgattactgcgcactaattatgtctaaacgtgttcgtgaacggtcggttgtttcggatgaaacggccaaacgcattcgacaaaacgaacactgtcatgccaaaaatgaatcttttttggggttttgcaacttggaagaaattgattattatcaatgtttaaaaatgcaatacgttccggaccaaaagtttgacaacgattttattttaacagtgtacagaatggccaacgtggtgacgaaacaagttagaccgtataacagtatcgacgaaaagcaccattacaacacggtgcgtaacgtgttgattttaataaaaaatgcgcgtttagtgcttagtaatagtgtcaaaaagcaatactatgacgatgtgttaaaattgaaaaaaaatacagacttggaatcgtacgatccattgattacggtctttttacaaattggcgaatctgtaaatgaagaaatacaaaaactcagaaaagctttggtcaatatttttactaataaacccgacaagtcggatataaacaacccagatgtagtttcgtatcaatttatttttggcagagtacaaaaattgtataacagggcaattaaacaaaaaactaaaactataattgtaaaacgtcctacaactatgaacagaattcaaatagattggaaaactctttccgaagacgaacaaaaaatgactagacaagaaattgccgaaaaaattgtaaagccttgttttgagcaatttggcactatattacacatatacgtatgtcctttaaaacacaaccgaattattgtcgagtatgcaaactcagagtcggtacaaaaagccatgactgtaaatgacgacactcgatttacagttacagagttttccgtggttcagtactacaacgtggccaaaacagaaatggtgaaccagcgaattgacataataagcaaggacattgaggatttaagaaacgctttaaaatcttacacataaattaaaatatcgaacaaaggaaaaaaacaattgtaacaaaaataatttacattaaaatttacaagtttttttctagtgtcgtacttttttacaatgcgtctgttgtccgtcgagcattgcaaacatattgtggacggcgcaaaatagcaaacaaaaggcacgtccgcgctctcccacgctattctaaaacgatgaatccatattaatttttcattgtcgccaaacgtcgctccgctgcctccttccaataacaaatactcagaaacacaaacatgtacaattgctgtcgcggcgttaattgtcgctgtttttccaaatagtctattatgggaaacaaacacttgtcacaacacaaatactcgttaattgtcacaaccgacaagcacatttggcaaaatgcgtcgcaatttttgtacggacgagattctatgcgaagttcgttgtccatgacgtcttgggtccactttttcaacaagacacttttatatttgtgatttgtacaactttggtacgtgttagagtgtttttgataagctttgataagtttaaaactgttggagtaaggccacgtcattatgttctgcaccttttgtttaaaagacagaaattactatatgttcaaactatttaaagattattggccaacgtgcacgacagaatgccagatatgtcttgagaaaattgacgataacgggggcatagtggcaatgcccgacactggcatgttaaacttggaaaagatgtttcacgaacaatgtattcagcgttggcgtcgcgaacatactcgagatccctttaatcgtgttataaaatattattttaactttcccccaaaaacactagaggagtgcaacgtgatgcttcgagaaactaaagggtctataggcgatcacgaaattgatcgcgtttacaaacgcgtttatcaacgcgttacacaggaagacgccctggacattgaactcgattttaggcatttttttaaaatgcaatcatgacgaacgtatggttcgcgacggacgtcaacctgatcaattgtgtactgaaagataatttatttttgatagataataattacattattttaaatgtgttcgaccaagaaaccgatcaagttagacctctgtgcctcggtgaaattaacgcccttcaaaccgatgcggccgcccaagccgatgcaatgctggatacatcctcgacgagcgaattgcaaagtaacgcgtccacgtaacaattattcagatcccgataacgaaaacgacatgttgcacatgaccgtgttaaacagcgtgtttttgaacgagcacgcgaaattgtattatcggcacttgttgcgcaacgatcaagccgaggcgagaaaaacaattctcaacgccgacagcgtgtacgagtgcatgttaattagaccaattcgtacggaacattttagaagcgtcgacgaggctggcgaacacaacatgagcgttttaaagatcatcatcgatgcggtcatcaagtacattggcaaactggccgacgacgagtacattttgatagcggaccgcatgtatgtcgatttaatctattccgaatttagggccattattttgcctcaaagcgcgtacattatcaaaggagattacgcagaaagcgatagtgaaagcgggcaaagtgtcgacgtttgtaatgaactcgaatatccttggaaattaattacggcgaacaattgtattgtttctacggacgagtcacgtcagtcgcaatacatttatcgcacttttcttttgtacaatacagtcttgaccgcaattcttaaacaaaacaatccattcgacgtaattgccgaaaatacttctatttcaattatagtcaggaatttgggcagctgtccaaacaataaagatcgggtaaagtgctgcgatcttaattacggcggcgtcccgccgggacatgtcatgtgcccgccgcgtgagatcaccaaaaaattttttcattacgcaaagtgggttcgaaatcccaacaagtacaaacgatacagcgagttaatcgcgcgccaatcagaaaccggcggcggatctgcgagtttacgcgaaaacgtaaacaaccagctacacgctcgagatgtgtctcaattacatttattggattgggaaaactttatgggtgaattcagcagttattttggtctgcacgcacacaacgtgtagcatcgccagtatttaacagctgacctatttgttaaacaagcattcttatctcaataattggtccgacgtggtgacaattgtatccacaatcatgaaaaaagtagcgcttggaaaaattatcgaaaacacagtagaaagcaaatataaaagcaacagtgtgtcgtcgtcattgtcaacgggcgccagtgcaaaattgagtttaagcgaatattacaaaacttttgaagcaaataaagtgggccagcacactacgtacgacgtggtcggcaagcgagattacacgaaatttgacaaattggtgaaaaaatattgacatgctgcgatcaatcatgcgacgtttcaagagtacaaacaatctcagcaaaaaaccctccgattattatgtagtgttatgtccaaagtgttattttgtgacgtcggccgaagtgagcgtggctgaatacatagaaatgcataaaaattttaacacgaaattcgccgatcggtgccctaacgattttattgtgaccaactctaaaagttggaataatcatgaaaattgttctgccctattttaccctctgtgttaataaagtttgttgtttgtattttgtggttttatttatttacgctagatattgggtttaaggttcttagaaatagagttgtattttccctaccaaaagggatttgagcttcatataaatacaatattcgctcgacaagcggtttatttcactcggaggtattatatcaggcagtcgaacgtgcgcgatgaaacatcccgtttacgctagatatttggagtttgatgatgtagtgttagatttgactagtttaatatttttagagtttgataacgctcaaaatgaagagtacattatttttatgaatgtaaaaaaggcgttttacaaaaactttcacattacttgtgatctgtcgcttgaaacgctgaccgtgttggtgtacgaaaaagctcgcctaattgtgaaacaaatggagtttgagcagccgccaaactttgttaattttatcagtttcaacgcgaccgacaacgacaactccatgataatagacttgtgttccgacgcgcgcataatcgtggccaagaagctgacgcccgacgaaacgtatcatcagcgcgtgtccggatttttggattttcaaaaacgtaactgcatacctcggcccccaatcgagtcggacccaaaagtgcgagacgccttggatcgtgaactagaaataaaactatacaagtagaaaaaaattaatttattaatagttgtaataattatcttcgtcctcatcttcgctggtgtcataatgcggtggtgtgtttgtgttttgttttaatcgtttgcgcgtcgacaccacttcgccgataggaaattttttggatttcgcattaaatgccctcttagcgacgcgccgtttacgactactaaacatgttgacgcgctcgtcgtcttcagtgtcataatccgtgctagtgttttcgttgttattttctatgagacgatcgtttgatttagttttcgtagaattgtccgcgttatcgtcgctttcgtcgatgtcgtccctaactatctcgtaggcggctttgcgcggaatccaagattttgcaatgtatctattttaacgtacttttcttcgagcgcttttctagctttatgcatagcaatgtcttcgtcgccgccgttcattttatgatactttgtaaacgtctcgacgaataactttttggcgcgaggaggcattttttcattgtataacatatcgggaatttgatacattgtaattagaattaagcaagttcgtcttcggttgtactgtattcggtttctgtatctgtagtggaatcctctgtactagtagtagtgtcgctattgttggcgtcaggccttggctgccatttaccgtctatcaacatgtattttttcctaacagcacaacatgctagcttggtagctatctgtgtcgacttatatttttgtaaactacgatcgtagaatttttcaaatatcctcttaccgttatagggaaggttttgataatatttaggcaacatatcaataaaagacaatataaaaactttgtgtttgtgttttatttatcacataaaatggacgtctggcaagaatcacaaccaatattagtgttttttttcttacattacgagattcaacttgatactaaaattaattattaattaaattaaattaaattttgaagcattttttcgctatcgttttcagactcaaaattatcgacgctatcgctatgaaaagcgtaatatttgttggctttgagatattctatattttgctcatttttaacaataaacacgcgactcttttcgtcgcgtctcaccataacaccgtttttacaaatggaaatgtatttgtaaaacggcaacagagcgtcgcgagtttttttaagtaacagcttttgctccgctgtggcggccacaaatatttttacgggcccgtcgtaattaatgtttaaattaaaatttttaagtcgacgctcgcgcgacttggtttgccattctttagcgcgcgtcgcgtcacacagcttggccacaatgtggtttttgtcaaacgaagattctatgacgtgtttaaagtttaggtcgagtaaagcgcaaatcttttttaaataatagtttctaatttttttattattcagcctgctgtcgtgaataccgtatatctcaacgctgtctgtgagattgtcgtattctagcctttttagtttttcgctcatcgacttgatattgtccgacacattttcgtcgatttgcgttttgatcaacgacttgagcagagacacgttaatcaactgttcaaattgatccatattaactatatcaacccgatgcgtatatggtgcgtaaaatatattttttaaccctcttatactttgcactctgcgttaatacgcgttcgtgtacagacgtaatcatgttttcttttttggataaaactcctactgagtttgacctcatattagaccctcacaagttgcaaaacgtggcattttttaccaatgaagaatttaaagttattttaaaaaatttcatcacagatttaaagaagaaccaaaaattaaattatttcaacagtttaatcgaccaattaatcaacgtgtacacagacgcgtcggtgaaaaacacgcagcccgacgtgttggctaaaattatcaaatcaacttgtgttatagtcacagatttgccgtccaacgtgtttctcaaaaagttgaagaccaacaagtttacagacactattaattatttaattttgccccactttattttgtgggatcacaattttgttatatttttaaacaaagctttcaattctaaacatgaaaacgatctggttgacatttcgggcgctctgcagaaaatcaaacttacacacggtgtcatcaaagatcagttgcagagcaaaaacgggtacgcggtccaatacttgtacgcgacgtttctcaacacggcctcgttctacgccaacgtgcaatgtttaaatggtgtcaacgaaattatgccgccgcggagcagcgtaaagcgctattatggacgtgatgtggacaacgtgcgtgcatggaccacgcgtcatcccaacattagccagctgagtacgcaagtctcggacgtccacattaacgagtcatctaccgactggaatgtaaaagtgggtctgggaatatttcccggcgctaacacagactgcgacggtgacaaaaaaattattacatttttacccaaacctaattccctaatcgactcggaatgccttttgtacggcgaccctcggtttaatttcatttgctttgacaaaaaccgtttgtcgtttgtgtcacaacaaatttattatttgtacaaaaatattgacgcaatggaggcgttgtttaaatctacaccattggtttacgcgctgtggcaaaaacataaacatgagcagtttgcacagaggctagagatgttgttgcgtgatttttgcttaattgccagttcaaacgctagttatttactttttaaacagcttacacagctcatagctaacgaagaaatggtgtgcggagatgaagaaatattcaatttaggcggccaatttgtagacatgattaaaagcggtgctaaaggcagtcaaaatctgattaaaagcacgcaacaataccgacagactttaaatacagatattgaaactgtgtcttcacgagccaccaccagtttaaatagttacatatcttctcacaataaggtaaaagtgtgtggcgccgacatatatcataacacggttgtgttacagagcgtgtttattaaaaataactatgtttgttacaaaaacgacgaacgtacaatcatgaatatttgcgctttgccctctgagtttctgtttccagaacatttgctcgacatgttcattgaatgataatataaatagagcgcatttgattgcatgcaatcagtgttttattaattttagagcaacatgtacgataaatttatgatctatcttcacttgaatgggctgcacggagaagcaaaatactacaaatatttaatgtctcaaatggattttgaaaatcaagtagccgatgaaatcaagcggttttgtgaaactcgtctgaaaccggcaatcagttgcaacactttaactgcggaaagtctcaatacgctcgtagacagcgtagtctgcaaaaatggactgttaaatccttacgccaaagaagtacagtttgctttgcaatatctttttgacgatgacgaaatatccaaacgagatcaagatggctttaaactatttttattacataattatgacaggtgtgaaaatatggaagaatattttttaattaacaattttagcatagcagactacgaatttgaagacatgtttgaaattgttcgtattgattgtagagatctgttattacttcttgctaaatataatatgtaattaaaattttgtttgttttattaaaatcctggattaaaaaatgacgaataatttgatttgcgtgcacgccaacaagattcttcgtcattatgatcaatgcgtgcatcaagtttatgcttttgtaattggcttctgaccactttagccatttgagcgtatctgcattcgtcgtctagagtttcaaacaccagatcggcgcaattataaaatccttcacccacgggatctatgcgctgccaacgcacatacattacaaattgatttgacctgtacggtattactacgggtatagaatagactagactgttgtcacataatgaatcgcccggatttggaattaaatttgaatcgttaccacctatgtattctaattcgttccaagttattggattgcgacgatcccagtttgatttagtaataaacacttcaaaataactgggctcgtgtatggctgttggacaaaaatgaacattcatctgataaaccggttgatagcgatttaaatatagcgtatttggcctccagttgttaaaaggttcgtccattccgcttttatcaccaaacacagaattgcgatcgtttgaaccggcaccgcaaagtgtgtgcggcacaaccctttgtttgattaggtcaaaatcgtcataattaggaccggccacagccgcgtattccatatactgttgaaacatgtattgcgctgtggaagcggccgccccggattctaaatcgagagctcgatatttataatagactgatttgtaagcattgcggcacgcggcgtcgggaatgttatcgccattgtcgggccaataaaagtttccatctttaaaacatttatattgacgggccgtcggcacggacaaatagccgtgagagcgcactgccggcgcgtgaatcgcagcaaacaatgcaattaataatgcaatcattatgattatacttatagaacactaatcggaataataaccgctgtcgtaatcttggtcaaaaacgttatgttgaaacataataacaccttacagtaacatacaataaaacaacatagtatcgtatataattataaactttattttttcattttatacaaacaaaatttatacgtattgttagcacattgagtgtcattttcgctgtctgaactatcacaatcatcgtcatcatcatcatcattgtcatcgtcgtcgtcacgtttgcgtttgacactgcattttttttggttaattttcactaacactggttcttttcgatcgtacaattgattctgcatgtacttttgcatgatcgcggtaaaacactttgcaattttatccttttgttcgtcgccaaatatttccagcaactcgttcataaatgtgcacaaaatgcccatgtgttttatccagctgattcgcattttcactggatcgaacaaacgcaaggggtacgctttttctgttaccttgccttcgatgtctatcaaaaggtacgggatacgatctccgttgccgggcacaaaatccgtgcctttgttaaccaaaatttctctacaatgcctagccaccgtaatcacgcgtcttttgggtgacggaccctcattatcgtcagttgatttgcgttttttgccggggttatcgttataggtcatactaaagctgtagtcggtcaacgattttgatttggcaaactcatcatagtattcataaaaactagtctgtaaactttgcaaacatttgtccatgtccaaatgacgcaatatttgttccactgccgtcctaaacgcgattctcataaaaacgggcatatcctttttaactaaccaacccttgtatacgattttattctcactgttgagatagcaatattttttcttttttaatagtattaaaactttcattaaattttcaaatgccattttgtaaccgtccgtgaatgagttattaacgcgtgtctcaacatgtgtgcatatttgttttaatgtgtcggtttcgttggatatttcgttatagttaaatgtgggcaaaacaaatgtagaatctgtgtcgccgtacacaactttaaaagtgatgctgcccagattgaatttttctaaaatctcagggtcgttgctcaaaccttcaatcagagaaatggccagccgcaactgattgcgaccaactctagtgatgtagtttgcaagcactttgtaaaaaatgccataataaccgtatatgctattggcggtgcgcttcacggaattttgtttttgatcgtacagatcgtacaagaatgccgattcgctttgattgtcgcgattctttttaaatttgcacctttcgcttaacaattttaatagcaatttaacaactattgcacgcgaattgtggttcaaatacacgttgccgtcttcgcataaaattaaattggacaaacaagcacaaatggctatcattatagtcaagtacaaagaattaaaatcgagagaaaacgcgttcttgtaaatgcctgcacgaggttttaacactttgccgcctttgtacttgaccgtttgattggcgggtcccaaattgatggcatctttaggtatgttttttagaggtatcaattttcttttgagattagaaatacccgctgcggctttgtcggctttgaattggcccgatattattgacagatcgtttttgttaaaaaaatacgggtcaggctcctctttgccggtgctctcgttaatgcgcgtgtttgtgatggctgcgtaaaagcacgccacgctaatcaaatgcgaaatattacatatcacgtcgtctgtacacaaacgatgcaatatacattgcgaatatacagaatcggccattttcaatttgacaaacaattttatcggcaacatgcaatcctgcacgttgtacttggcaatcacgtccagccgtcgagtgttgtacatcttgaccatttcggtccaaggcaaatcgattttgttttcacccaaatagtaactactgattgtgttcaattgaaagttttcaactttatgctgattagaatcgctgctgaaaaatttatacaaatcaatgtgaatgtaatagttaaaataatacgtgtccactttgttgcccaacttgtttataaacagctttgtcgtcggcgccgcagccggcaaatcgtaacgctttaatagcattttggttttattcaatcgtccaagtatatagggcagatcaaatacgtctccgttaaaatccaaaatcacatcgggatttgtaatttttatcatgtcaaaaaacgctgtaatcatgtcgatttcattttgaaacatgaccacatacgtgtcatcgtcataggtctctggaatctgggtcggcagcttgtgatacataaaacaaaattttgcatactcgtcgtttttgtacaccacaaatcctatagacattatgcaatcaaccgatgctttcgacatgttgtggccgtccgaatgagtctcaatgtcatagcacgacaaaacgggcatgatgccgctggttaaagtcatttcatcgaccaactcaaagtcttcattaaaatgttgcaaattaaacatgcgcgtcgtcgatccaccgacatagttattttggcagcgttgtgttttcttgaatcgcatataggcgccttccacaaacggcgtttgcatgtgtacgcgattaacgttgtgaagaaacttgtccaaacacgccgcgttgtccgatggcgctgctttgtttctttcgtatttaatcacgtttatcttgttcaaataatttccttccacgcccggcgccacaaacgtggtgtagctgatgcacttgttgcggcaagacggaaatatgtgcttgtcgtagcattgtttgtaagaatacaaatttagttttactttaaagtaaaactgcagcactcgttctttgatatttgtattacaaaatgcaaacaagcaaccttgtttttcatcgtaatgcaaacgaatgatacgaaacgtatcggctgaagtaatattgaattctcctggttttgcatattctgcaaagcgcgttttgagttcattgtaaggatatattttcatttttaaatatgcagcgatggcccaaatatggaggcacagacgtcaacacgcgcactgtacacgatttgttaaacaccataaacaccatgagtgctcgaatcaaaactctggagcggtatgagcacgctttgcgagagattcacaaagtcgttgtaattttgaaaccgtccgcgaacacacatagctttgaacccgacgctctgccggcgttgattatgcaatttttatcggatttcgccggccgagatatcaacacgttgacgcacaacatcaactacaagtacgattacaattatccgccggcgcccgtgcccgcgatgcaaccaccgccaccgcctcctcaaccccccgcgccacctcaaccaccgtattacaacaattatccgtattatccgccgtatccgttttcgacaccgccgccaacacagccgccagaatcgaacgtcgcgggcgtcggcggctcgcaaagtttgaatcaaatcacgttgactaacgaggaggagtctgaactggcggctttatttaaaaacatgcaaacgaacatgacttgggaacttgttcaaaatttcgttgaagtgttaatcaggatcgtacgcgtgcacgtagtaaacaacgtgaccatgattaacgttatatcgtctataacttccgttcgaacattaattgattacaattttacagaatttattagatgcgtataccaaaaaacaaacatacgttttgcaatagatcagtatctgtgcactaacatagttacgtttatagatttttttactagagtcttttatttggtgatgcgaacaaattttcagttcaccacttttgaccaattgacccaatactctaacgaactttacacaagaattcaaacgagcatacttcaaagcgcggctcctctttctcctccgaccgtggaaacggtcaacagcgatatcgtcatttcaaatttgcaagaacaattaaaaagagaacgcgctttgatgcaacaaatcagcgagcaacatagaattgcaaacgaaagagtggaaactctgcaatcgcaatacgacgagttggatttaaagtataaagagatatttgaagacaaaagtgaattcgcacaacaaaaaagtgaaaacgtgcgaaaaattaaacaattagagagatccaacaaagaactcaacgacaccgtacagaaattgagagatgaaaatgccgaaagattgtctgaaatacaattgcaaaaaggcgatttggacgaatataaaaacatgaatcgccagttgaacgaggacatttataaactcaaaagaagaatagaatcgacatttgataaagattacgtcgaaaccttgaacgataaaattgaatcgttggaaaagcaattggatgataaacaaaatttaaaccgggaactaagaagcagcatttcaaaaatagacgaaactacacagaggtacaaacttgacgccaaagatattatggaactcaaacagtcggtatcgattaaagatcaagaaattgccatgaaaaacgctcaatatttagaattgagtgctatatatcaacaaactgtaaatgaattaactgcaactaaaaatgaattgtctcaagtcgcgacaaccaatcaaagtttatttgcagaaaatgaagaatctaaagtgcttttagaaggcacgttggcgtttatagatagcttttatcaaataattatgcagattgaaaaacctgattacgtgccgatttctaaaccacagcttacagcacaagaaagtatatatcaaacggattatatcaaagattggttgcaaaaattgaggtctaaactgtcaaacgccgacgttgccaatttgcaatcagtttccgaattgagtgatttaaaaagtcaaataatttctattgtaccacgaaatattgtaaatcgaattttaaaagaaaattataaagtaaaagtagaaaatgtcaatgcagaattactggaaagtgttgctgtcacaagtgctgtaagcgctttagtacagcaatatgaacgatcagaaaagcaaaacgttaaacttagacaagaattcgaaataaaattaaacgatttacaaagattattggagcaaaatcagactgattttgagtcaatatcagagtttatctcacgagatccggctttcaacagaaatttaaatgacgagcgattccaaaacttgaggcaacaatacgacgaaatgtctagtaaatattcagccttggaaacgactaaaattaaagagatggagtctattgcagatcaggctgtcaaatctgaaatgagtaaattaaacacacaactagatgaattaaactctttatttgttaaatataatcgtaaagctcaagacatatttgagtggaaaactagcatgcttaaaaggtacgaaacgttggcgcgaacaacagcggccagcgttcaaccaaacgtcgaatagaattacaaaaatttatattcattttcatcttcgtcatacttcaacagtcccaacacgttcatgttgtgattctcgccgttctcgacagttacgtaaatagttactttgattaaattatcttccagcagcattgagatttgattgaaatccgcacatagcttttgtagcgaatccgcttcggtttttttatttgtgttgacgtagaaaacagatttgttccatttgcccaagtcggaagaggtagaacagtcatccgaatcggcaatgttcaactcgtcgcttttaaactgcacaataaacttgttatcgcccatgtcattttcttccaattcgctttttaacacatttacattgtacgaagcaacgtgtttgttcgatcgactaatgttgatctttgcgtttgtgcaattttgcaaatttgaatatgcttcgctttctttagcctcgcacaattcgatgcgcgtagagttgaccacgttccaattcatgtacacgtttgatccattaaaaatttgttgacactttatactgtaaatggtaaagatttggttttcattgtcttttaaatatttaaacacctcattgatgtcgtcagacccctttatattgttcttgaatagatttattagtgttttcgcattgacagaacattccacttgaaccacgtcgggatcgtcgttgagatttttgtacacaacctcaaaaacaactttgtacaaaccgctgttgattttcttgtagataaatttgtactttacaataatattgacgccatcttcattttcaaaatgtttgttagtcaaatagtcgctcatgggggttgcagtttcaatttccatttcacattctttgtattcgttgatctgaatcatttgactaaactttgttttcacataatttaaactaatgtcatagcacttgccttcttccatgtctttgaaagattgcgaatcgccgtagtattcttgaattttgttgtcggacattattcgaaaagtgtaatggtattcattatcgatactcaacgtcattttgctcatcaatttaccactaatccttttgtaattttctctaatcttcttggggctactggccatagccatgcgttttataagcggctcaccgctactttctccagacaaagatcttttggtcgccatattgctgttgtcgatatgtgggaatctatccgatggcaaatactgaatggcgacgaaatcgaagtgtcgccagagcaccgttcgttagcgtggagggagttgattataaacgtggccagcaacacgccgctcgacaacacgttcagaacaatgtttcaaaaagccgattttgaaaatttcgactacaacacgccgattgtgtacaatttaaaaacaaaaactttaacaatgtacaacgagagaataagagcggctctgaacagacccgtccgatttaacgatcaaacggtcaatgttaatattgcgtacgtatttttgttctttatttgtatagttttgctgagcgtgttggccgtctttttcgacacaaacattgcgaccgacacgaagagtaaaaatgttgcagcaaaaattaaataaactcaaagatggtttgaacacgttcagcagcaagtcggtggtttgcgctcgctcaaaattatttgacaaacgcccaacgcgcagacctagatgttggcgaaaactatcagagatcgacaaaaagtttcacgtttgccgacacgttgacacgtttttggatttgtgcggcggaccgggcgagtttgccaactataccatgtcgttgaacccgctttgcaaagcgtatggcgtcacgttgacaaacaactcggtgtgcgtgtacaaaccgacagtgcgcaaacgcaaaaatttcacaaccattacggggcccgacaagtcaggcgacgtgtttgataaaaatgttgtatttgagattagcatcaagtgtggcaacgcgtgcgatctggtgttggcagatggctcggttgacgttaatggacgcgaaaacgaacaagaacgtctcaactttgatttgatcatgtgcgagacgcagctaattttaatttgcctgcgtcccggcggcaattgcgttttaaaagttttcgacgcgtttgaacacgaaacgatccaaatgctaaacaagtttgttaaccatttcgaaaaatgggttttatacaaaccgccttcttctcggcctgccaattccgaacgctatttaatttgtttcaataaattagttagaccgtattgtaacaattatgtcaacgagttggaaaaacagtttgaaaaatattatcgcatacaattaaaaaacttaaacaagttgataaacttgttgaaaatataacgtgtgtataaaaagccagcggcttcaaatcaggcatcattcaacatggattcgctagccaatttgtgcttgaaaaccctgccttacaagtttgagccgcctaagtttttacgaacaaaatattgcgacgcatgtcgctacagatttttaccaaaattttctgatgaaaaattttgtggacaatgcatatgcaacatatgcaacaatccaaaaaatatagattgtccatcatcatatatatcgaaaattaaaccgaagaaagaaaacaaagaaatatatattaccagcaacaagtttaataaaacgtgcaaaaacgaatgtaatcaacaatcaaaccggagatgtttaatttcctattttacaaatgaaagttgtaaagagctcaattgttgttggtttaataaaaactgttacatgtgtttggaatataaaaagaatttatacaatgtaaatttgtatacgattgatggtcattgtccttcgtttaaagccgtttgtttttcatgtataaaaagaatcaaaacgtgccaagtttgcaatcaacctttattgaaaatgtacaaagagaagcaagaagagcgtttgaagatgcagtcgctgtacgcaacgttggccgatgtagatttaaaaatattagacatttacgatgtcgacaattattctagaaaaatgatattgtgtgctcaatgtcatatatttgcacgctgtttttgtaccaataccatgcaatgtttttgtcctcgacagggttataagtgtgaatgtatatgccgacgatctaaatattttaaaaataatgtattgtgtgttaaaagtaaagcggcttgttttaataaaatgaaaataaaacgtgttccaaaatggaagcatagtgtagattatactttcaaaagtatatacaagttaataaatgtttaattttaaggatattgttatggaataaactataaaatgaatttgatgcaatttaattttttgatactttccacagacggtagattcagaacgatggcaaacatgtcgctagacaatgagtacaaacttgaattggccaaaacggggctgttttctcacaataacctgattaaatgtataggctgtcgcacgattttggacaagattaacgccaagcaaattaaacgacacacgtattcgaattattgcatatcgtcaaccaacgcgttgatgttcaatgaatcgatgagaaaaaaatcatttacgagttttaaaagctctcggcgtcagtttgcatcacaatccgtggtcgttgacatgttggctcgtcgcggcttctattattttggcaaagccggccatttgcgttgttccggatgccatatagtttttaaatataaaagcgtagacgacgcccaacgccggcacaaacaaaattgcaagtttctcaacgcaatagaagactattccgtcaatgaacaatttggcaaactcgatgttgcggaaaaagaaatactggctgccgatttgattcctccgcggctaagcgttaaaccttcggcgccgcccgccgaaccgctaactcaacaggtctccgaatgcaaagtttgttttgatagagaaaaatcggtgtgtttcatgccgtgccgtcacctggctgtgtgcacggaatgttcgcgtcggtgcaagcgttgttgtgtgtgcaacgcaaaaattatgcagcgcatcgaaacattacctcagtaaacattgcaaacgactacgacattctttaaaaataagctatatataaatattgcattgtatgacaaaaaaattattaacctactgcaaagtaaaacttgtaaaaggcttttcaaaaaaatttgcgagtttattttgtcgctgcgtcgtgtcgcatctaagcgacgaagacgacagcgacggtgatcgctattatcagtataataacaattgtaatttcatatacataaatattgtaaaataaaagacatattattgtacataatgttttattgtaattaaattaatacaccaatttaaacacatgttgatgttgttgtgaataatttttaaatttttacttttttcgtcaaacactatggcgttgctttcgattagttttttcgttagcatttcatctaaaaaatcaaactgtttgcccggcgcgtttagggattctatggtgtagtcgggcgtgtcgctgtttagatattggtccacttcgcgcattatgtccaagacgttgttctgcaaatgaatgagctttgtcaccacgtccacggacgtgttcatgtttcttttttgaaaactaaattgcaacaattgtacgtgtccactatacaattcggcttaatatactcgtcggcgcaatcgtatttgcaatccaatttcgtgttcaacaaattggtgatgatatctttgaacgtgcacgttttcaatttgtccttatcggccaacgcaagtttcaattcgctctgtaaagtttctaaaattttgtctttattgttgtcaaattcgtgcgtgttgcgttccaaccacaatttgaacggctcgtcgacaaaaatgctgcgcaacacctcgtacaactgtctgcctaacgtgtacacttgctcgtattctttcatgctgacctctttgctaacgtacattactaaaaaatctacaagtattttcaaacatttgtaataggcgacgtattttgatttaagttttaaaccgtccaccgtgtattcgtccacgttcgcatcgaccacttttcgattattatcgccgcttgttgccggcgcgtcggcctgttcggttttaactatatccggttcaatatttaaagtttcaaaagatttaatggcattcataaaatcatctttttgctttggcgtggtcaatggtaaatctatcgaggagttgtcgtccgtgtgctcttcgggcacgctgttcagacgtaacgtaatctttttgggatcgtcttcatcgggtatcaaatcggctttaattttattagaattgagcaacgacatggtggtcgcttgtaaatttaataaattaattaaagactgaaattgtatattgcacaaatttattttcatttttattgatcttactattaatacgctggcagttggtatgcttcatccatttttgtgactagaaaatttgctaaaaaactgagctcgtcctgtgttaaaacgttgtcgtccacgaatctatgcaatgtaaatgttacactgacattgtttaacaatgcatgtattaaaaaatcaacctgtcgcctactgagtttattagaagagtcgaccgtttctactagtttgtagattttgttattttcaatttcattgtttaaaaacatgttaactactcgtttgagtttaagcgaaaaatccttgtccggatagacttgttcgcacagccaattgctaagagtggttttgaccacggacaccttggtggtgaacgtcgtcgatttgaccagttcggtgaaaaagtttttcattaaattggacattttaacaaacacttatcaatctattgagctggtatttttgtttagaatcgcatcaagcgcttgctcgatctccaatttttttcggacgctcttagctttatgactcggtatgtcttctacggtagactcggtgttcttacttataatggccgggctgacgataataaacacgagaaacaatatgagcagatacaaaaagatgctgttttcctttttgtcatacactaggctaaatatggccagtgcgcccaacaacaaatataaattcatttttattcccttactctattcgttgcgatagtacaacaacgattctcccgacgaaccggacgaattgcgattatgctgcgcgtcgtcgtcgtcgttgttgttctcctcttcgctgctcgtttcgtctaaacctatattgtatttgttcaagtaatgtttggtgcttgcggaggattcgtggttcattaatttggccactttttgtaaaggcacgccgctattgtataggttactgctcaaataatgtcttatcatgttgctgcgcggccgttccatctcgacgcccgactcttcaaggagtcgcctgaaatctttgaagggcgtcgaggtgtttttagatatttgcaaaatggtcgggtttcgtgaataaatctcgcgtgccaattccaacggtttcattttgatgttgttgagtgtgttattacgactgcgttttcgctttaaattaatcgtgtcgctgtgcagttttcctcttttaattagcacgttgagatcgtccacgctgagttggcgcgcttcgttgattcgcatacccgtccctaacatgatgcaaaacactatcgcgcccctaattagaccgcggtcgtgaacataatcgctgttgagcattttaattttatcattaataaaatttaatatggtatctattacgtttttaagcattaaattcttttccttttccctgatatttttgagctccttgtcgcgcggcagcataaccatgcggggaattttgtattcgggcaagttcatcatgttggtgtaaaagtttatagtcaactgtagtgtttctttggtgaccgagcgaagttcgagcatgcgcctgcacagttcttggggatcaatgagaagtgtttggttttctatcgagtcaaactccttgtccaacgagtacgacatgtcttccaggtgaacatcgtctaccgagcagtacacaattttaatgaatcgagacttgtaactttttaaagtggtgggcgcaaacggtttggggaacatgtacttgctccacagactgttgtttttcacctcgtcgggcgtgcatcgttgccgatcggtggccaaatcgaacacggactcgaaccggggagcggattgaatttttattttccaagaattaaaattgttttcgttgcgaacattaaaaccgttcattgtggttaatcaaatttattaaaaacaaaaggagaatcggtgtcaatactatccgaatattgttgttgttctcttaatattacgaaataatatattacatacagcagtaagaataaagctataaaagcgactacactaattaaaattataattcccgccgacacgttgctcgtcgtgttgtcatagcccaccatgtcgtttattggcattttgtgaacgggctcgctaaattgttgcggttcgctggcagtatcgtcgttgagcgccaatttcaacgggatgtattccaccttttcgtggttgcccaaccgatagtagggcacgtccaaattcatgtttacaacttatttgctaacaggaatttatgcaacaaaagtggtttggctttgatgagacgcaatttgaaatacttgctgcatttacgcttaagattgtattccatgcgggcggcggtgttgtagtcgtacgcgctcgcgctgtgatacacgagccgtaaattggttgcgttgcgcaaacacttggcgccttgtttgttcgaatgctgttttatgcgtctgttaagattgctcgtgatgcccgtgtacaattttccattgtcttgccgcagaatgtacacgcaccacaccttgttggtgtacagagtcgtcgccatgattatgcagtgcgccctttcgtgttcggccgagtggcgttaggcgcagccgcggcaataatcgcgttggcgtccttgttgtaatttatttgttgaaaaataaaacgtcttagagtttcgttttggaacgccaattcggtcaagctctcctggcaagcgcttttggtcaaatgagcggccggcgaattgaccgcgttggcggccgacgttaagaaggtggcgttctggaacatgctgggctgcttgccggctcgcgtcgccagctcggccatgtaattgaatatgttggcagacgcagatagcggcgccaaaaacgcaacgttctcttttaaactcatgactcgcgccctgtttttttcgttcagcacgtagtggtagtaatcgccgccgccggcaaacagatcgtcaatcacggcgttgatcagatcgttgatcatgttgatgtgcggaaagcgacgcgactcgactgcgctctgtatgtttggcggcagagtggcgtgcttgagcaacagagtcatgtaattgttggccagctgctgattgaaaggtaacggaatgggaatgttgcacgtcaccgcttccgccaccatgtactggacggccagactgagttgtttggcggcctcggccaaagcgtctttgcccaacatatcagcgccaccgttgtaaaacttttgcgcgtacgccggcagcgaatttagcacaaacgatggctgaaatatatttgaatcgctcgacagggactcggccgcgttgctctgtcccaactctttttgcaaccgaatcaggtggcgtatcatggtttcctccgattcaaaccgctttaccacgtttacgctgattgggttcgtgtcgatgcacatgtcacgaatagtgtttataaaaagaatcatgagaggactaagttctgacatgtcattgcacctgtaatatctaataatcttttgaacaaaatccacacatttgttgtaccaaatagattcaccggcgtcgagcgtcggttctttgctcttgttgtacggtgcaatcgctaccgagtttgtgctgttgctgcggctcgtgtaatccatcctgttgtcgcgcgtggcgacggtcgtaggcaccgtcgccggcggcacgtacccgggcgcgttgtaagtttgcgcgctggtgaatatggccgttgccggattagagggatacctcagcggcggaggggtgttgtaataaaaattgccacgttcatctgtcatactttttatttgtactcttatgattacaaaactcaatatacggattacttataatatagttgttgtgacaaaaaagcgataataaaattaacaaaattatcaacaagttaatcatggaaaatttttcaacgttgaataacaacaacaaaatggcgcaggtcaacagcaccgtttgaaaactgacgcgccgacacaaaatgctttcgcaatttctaaaagccacattaaacgaattttcacctttgatataatcacgcagttcttttttacaacattcgtcgcacaaaattaacacctttataatgaggccgtcggtgtgtatcgtttgaaatgtccgcggttgactgcctggatgaaattcaaacgagtacccagtggacacgtgtatctgtgcaaaataatgggctaatatcgaggcgcccgtttttttaacctttacttttgatattttaataacattaatgttgttatttgcgtaatcagagtttttattgtggtgatcatcgtacaaataatgaagcaacagttcactatcgtatttaatcttgtttagcgttgtcaagtttttgtttcttaggcgttggagcgtctccgtcgtcgatattttcttcgaaatcgagtccaacaacgtcggcgtttccttcttgctcatcgatagcggcggcggaggcggcctctccgtcgtcgtcattcgcggtttctacagtgcgtttgggcgacgacgtgtgtacagcagcgtccgtcttactattatcggaccgccaaatttttgtttgaaataacatttggcccttgttcaactttatttcggcgcagttaaacattattgcattaagatcatattcgccgttttgcaccaaattgcacaaaacaccatagttgccgcacgacactgtagaataggcgtttttgtacaacaatctgagttgcggcgagctagccaccttgataatatgggcgccaacgccccgtttttttaagtaatattcgtcttcaattataaaatctagtacgttttcatcttcactgttgatttgggcgttcacgatgatgtctggcgtaatgttgctcatgcttgccatttttcttataatagcgtttactttaatgtatttggcaatttattttgaatttgacgaaacgactttcaccaagcggctccaagtgatgactgaatatgtgaagcgcaccaacgcagacgaacccacacccgacgtaataggctacgtgtcggatattatgcaaaacacttatattgtaacgtggttcaacaccgtcgacctttccacctatcacgaaagcgtgcatgatgaccggattgaaatttttgatttcttaaatcaaaaatttcaacctgttgatcgaatcgtacacgatcgcgttagagcaaatgatgaaaatcccaacgagtttattttgagcggcgacaaggccgacgtgaccatgaaatgccccgcatattttaactttgattacgcacaactaaaatgtgttcccgtgccgccgtgcgacaacaagtctgccggtctttatcccatggacgagcgtttgctggacacgttggtgttgaaccaacacttggacaaagattattctaccaacgcgcacttgtatcatcccacgttctatcttaggtgttttgcaaacggagcgcacgcagtcgaagaatgtccagataattacacgtttgacgcggaaaccggccagtgtaaagttaacgaattgtgtgaaaacaggccagacggctatatactatcatactttccctccaatttgctcgtcaaccagtttatgcagtgcgtaaatgggcgccacgtggtgggcgaatgccccgcgaataaaatatttgatcgcaacttaatgtcgtgcgtggaagcgcatccgtgcgcgtttaacggcgccggacacacgtacataacggccgatatcggcgacacgcaatatttcaaatgtttgaataataacgagtcacaactgataacgtgcatcaaccggatcagaaactctgacaaccagtacgagtgttccggcgactccagatgcatagatttacccaacggtacgggccaacatgtattcaaacacgttgacgacgatatttcgtacaacagtggccaattggtgtgcgataattttgaagttatttccgacatcgaatgtgatcaatcaaacgtgtttgaaaacgcgttgtttatggacaaatttagattaaacatgcaattcccaactgaggtgtttgacggcaccgcgtgcgtgccagccaccgcggacaatgtcaactttttacgttccacgtttgccattgaaaatattccaaaccattatggcatcgacatgcaaacctccatgttgggcacgaccgaaatggttaaacagttggtttccaaagatttgtcgttaaacaacgacgccatctttgctcaatggcttttgtatgcgagagacaaagacgccatcgggcttaacccgttcaccggcgagcctatcgactgttttggagacaacttgtacgatgtgtttgacgctagacgcgcaaacatttgtaacgattcgggaacgagcgttttaaaaacgctcaattttggcgatggcgagtttttaaacgtattgagcagcacgctgaccggaaaagatgaggattatcgccaattttgtgctatatcctacgaaaacggccaaaaaatcgtagaaaacgaacattttcagcgacgtatattgacaaatatactacagtcggacgtttgtgccgacctatatactacactttaccaaaaatatactacactaaactctaaatatactacaactccacttcaatataaccacactctcgtaaaacggcccaaaaatatcgaaatatatggggcaaatacacgtttaaaaaacgctacgattccaaaaaacgctgcaactattccgcccgtgtttaatccctttgaaaaccagccaaataacaggcaaaacgattctattctacccctgtttaacccttttcaaacgaccgacgccgtatggtacagcgaaccaggtggcgacgacgaccattgggtagtggcgccgccaaccgcaccacctccaccgcccgagccagaaccagagccagaacccgagccagaacccgagccagagttaccgtcaccgctaatattagacaacaaagatttattttattcatgccactactcggttccgtttttcaagctaaccagttgtcatgcggaaaatgacgtcattattgatgctttaaacgagttacgcaacaacgttaaagtggacgctgattgcgaattggccaaagacctatcgcacgttttgaacgcgtacgcttatgtgggcaatgggattggttgtagatccgcgtacgacggagatgcgatagtggtaaaaaaagaagccgtgcctagtcacgtgtacgccaacctgaacacgcaatccaacgacggcgtcaaatacaaccgttggttgcacgtcaaaaacggccaatacatggcgtgtcccgaagaattgtacgataacaacgaatttaaatgtaacatagaatcggataaattatactatttggataatttacaagaagattccattgtataaacattttatgtcgaaaacaaatgacatcattccggatcatgatttacgcgtagaattctacttgtaaagcaagttaaaataagccgtgtgcaaaaatgacatcagacaaatgacatcatctacctatcatgatcatgttaataatcatgttttaaaatgacatcagcttatgactaataattgatcgtgcgttacaagtagaattctactcgtaaagcgagtttagttttgaaaaacaaatgagtcatcattaaacatgttaataatcgtgtataaaggatgacatcatccactaatcgtgcgttacaagtagaattctactcgtaaagcgagttcggttttgaaaaacaaatgacatcatttcttgattgtgttttacacgtagaattctactcgtaaagtatgttcagtttaaaaaacaaatgacatcattttacagatgacatcatttcttgattatgttttacaagtagaattctactcgtaaagcaagtttagttttaaaaaacaaatgacatcatctcttgattatgttttacaagtagaattctactcgtaaagcgagtttagttttgaaaaacaaatgacatcatctcttgattatgttttacaagtagaattctactcgtaaagcgagtttagttttcaaaaacaaatgacatcatcccttgatcatgcgttacaagtagaattctactcgtaaagcgagttgaattttgattacaaatattttgtttatgatagcaagtataaataaccgcacaaagttaaatttttttcatttacttgtcaccatgtttcgaatataccctaataacacaactgtgcccggttgtttagtgggtgacattattcaagttcgttataaagatgtatcacatattcgctttttgtcagattatttatctttgatgcctaacgttgcgattgtaaacgaatatggacctaacaaccagttagtaataaaacgcaaaaacaaatcgctgaaaagcttgcaagatttgtgtctggacaaaatagccgtttcgctcaagaaaccttttcgtcagttaaaatcgttaaatgctgtttgtttgatgcgagacattatattttcgctgggtttaccaattatttttaatccggctttgctacaaagaaaagtgccgcagcgcagcgtgggatatttcatgaattcaaaattggaaaggtttgccaattgtgatcggggtcatgtcgttgaagagaaacaattgcagagtaatttgtatatagattatttttgtatgatttgtggtttaaatgtttttaaaataaaagaataacaatttacacattgttttattacatggataatgttgtttgtttgacattaaaggttatcatggtgcaatgattaataataaaacaatattatgacattattttcctgttattttacaatataaaatcacaccaattgtgcaaagttttattatttgtttgtcgacggtcgaggggtcagcggcgtgtgcaacaataaaaaacatgaagctgttaacaattttgattttattttattcattttttatgaatttgcaagcgctaccagattaccatcaagcaaataggtgtgtgttgctgggaactcgcattggatggaacgatgacaatagccaagatcccaacgtatattggaaatggtgttaaataaaagtgaatatattttttataaaattttttatttaaaattccaagtaatccctgcaaacattaaacactgtaggtatttttaaatcttgccacatgcgaacaacgcacggcctgtcgtcgaacaccgctattacattatattttcctctgatatagttgttaaacaattttaattttaataaataatctttacaagtatcgtctgaaggcctcataaacaatttatatgatttaatatcaaaatacttttcaatccagtttcgagtgggctgttcacaaattacgcttctcccgctcataaacacgataattgcgtcgtggcaatttgccaaatacttaacgcaagtaataacgtctaagcgggcttcatcttgagcaactctattatcaaaatcataaaacgatctatttgtgggcaaagctactgtaccgtctaaatcacataatacagcgcggggaaatttgtcgccgacaggaacgtaatattcgaaattatttacctttagaaactttttatattgctttttaatagtttctggatttaatggaaatttatcagagcgtttataattgcgttcaagagccgtttccaaagaaacgtccatcaaacgcgttaaaaaatggtaattatgcgttgcggccattttttgccacatgtccaccgattgagtgttcaaattagtgtcgctgacaaccacgttggcaccacattttgcggcttttaaaaactgttcaatgcacattttggtaatttgttcttctttagtttgtctacatttccgcgattggttatagaaagcgttcagttttgtataatcgccgtttaaaaacaacttaacgcgcacgtcgtctctgttgatttctgtatagccttttaaacttttggcatacgtgcttttgcccgaacccgaaatgcctatcaacaccaacaattgttttgaagaaggcaatttaattgttggagcaagtttattatttaatgcctgcttagtcgatacaaattttataatatttttgatcattttaattttttcaggctcggttaattttaaaaattcgctctccacatcgatcgtttgtgctttacgacatctgtacgctaaacatttccacggcaaagtttgcaccagttcgttgaaacgctgttgattcaaagtcaaacccgacaccataatatttattgtagactcgttggtgaacgtgtttctagcatcaacgtacggtttaatgacactttttaaatgcgggaaaagagctagaaagtcatcgtgttcgccatttataacaagctgcgccaatttagtaggattttcagcacggctctgatttttgtgcatgttcaaatacacgtcgcttttaatcttgcatagtggcgcgttgtttttatcgtaaactacaaatccttcttccaaatttttcaactgggccgcgtgttcgacacattcttgcacagacgtaaactcgtaacatttggggtatttgcaaaacggcaaattggaacagtaaaaataatcgcccgtttcgttgtttctgcttgccaaataccacaacgttggctgttcatcgtaaacggttacaattctgttgtgtttgcttgttaactcaaacatgtgagtcgacgcgcagtctaaatattcgttacacaacgcttgaaattgattgtgggcctcgtcaagttgaagagcttgcaaaactaaacgtttaaacgtcacgtctgacacgcaaaggttttctgcaaaagcacttcctcgggtgctggcatgccattcgccgttgtacttgtagattttaattaaacttccgtcgattttttcgtaaaacttaaaattctccttcgattggaacagtttgtgatgagcatcttcgccgccgatattttgtagcaattcttgaaaattaaagaaacgatcgaaagaacgcgacacaacggcgtacgtgcggctgttaagaattaaaccgcgacattccacgaccacaggatgatctcgatcgcgttcaaacgattcgtaattaagaaccatcaaatcgtgttcggtataatttttaattttgactttaaacttgtcacaaagatttttcactccgccgtttgcaagtagacgcgaaacgtgcaacatgattgctgtttaataatgcataccaatgctaaactgtctattatataaagtgcagtgataactttgttatcaacgcgttcgatgccgacatatataaacgcaatgtaacagtttttgctagtaccatcgcatacaacattatgaatacaaggggttgtgttaataataataaaatgatatttatgaatgctttgggcttgcaacctcaaagtaaattgaaaattattgcacataaaatactagaaaaatgtaaacgtgacgcgtacacgcgtttcaagggcgtaaaggcgatcaagaatgaactaaaaacatacaatcttacgttgcaacaatacaacgaggcgctcaatcagtgcgctttaaacgatagccgatggcgcgacacaaataattggcatcacgatattgaagaaggtgtgaaaataaacaagagacatatatatagagttaattttaattctaaaacccaagaaattgaagaatattattacattaaagtagaatgttatgtaaacagttaattaatctacatttattgtaacatttgtggtaatagtggcgttggttatacatttatatgattgtaatgttgtgtactcgttttgtaataaatttttgtgtttaatcaattcaatatttttatttgataaaaccttattttcgctactcaatttggcgtttttagacgcaagttttgcgtaatcgtcattgagcgattttagcgccttttcagttgtaattcgtttcagttgcaattctttaaaagatttatgcatgttgttgtagtcgcttttaattttgtctaacttttcttgcatagaaacgcttgtttgttgtaatttgtctaaatctaattgttgtttaatgttgagctgcgtttgttcggcaatgtctacctgtagtttttttagtatcgcttgtgcttcagacagcatagtgtcgtcggcatttgcgttgttgtcttctgcgtcgtccaacagacttttttcaaacaacacactggccaaagaggccgcatcaaaattagcgtttattttattccattgtgcgacactcgacgcgctgcatttaatcacatccacaacgtttcggtttacgctgtaaacgttgaaatgcaaactttcaaccctacacaagggacatggtactttttttcgttttctaatcttgcgtatacacattgagcataattgatgtttgcacgtgtctagttctaatacgggtattatagtcaatctgtctattggttgcagaaaataatttttaatttctgcaaccgaaaaacaaatgttgcattgcaatttaacaaactccatttttagacggctattcctccacctgcttcgcctgcaacaccaggcgcaggacctgccactgcgccgccgcccagagtagcgttaggatttgctcttggtataaagtcgttgcgcaaaaagttgttttctgaattgattatttggtatcccaaaaacagcggaacgtacgtcgggtattcttcgtatccgctaagcgttctgtccagctcacgtgtgtcgccttcaaatttcaaaacgtttctaatttgcaaacgattgggttgacttctcataatgtcactgcttcttatcgggttgtacaactcggggccgtcgggcacagacgcgaccagacccgtttcgtcaattatacacgtggcgcaatttctaaacctcaattcctccgtgtcgatttgcaagtactcgggcgctactgcgcgtcgaatcaaattttgcaaaaatccactgtaattgttaaataattgatcgccagcaccgcctcgaagcgctcgggcgttggtcacgtcaaagaaacgcaattcgtctcgcgacacccgcgaacaaaacgtgttcgggtttgtggtgtccagaatgctttttgtagttgcgtaaacgctgtgtataacgcgttgcgtgttgcttgtgaaaccttcggtatattttagattgtcgcatatagtgttaactgcgttttcgttgttatatatcaaatgaaagattagctgttcggcttgcatcatactgtttagattaaacacgtcttggtaattggttgcgcttggaattaaaattcgcttgatacctctttctttatttccaactaaatgcctagcgatcgtcattttgaattgattgtcgtcttcgtcgaaaatgggcaaaaccatttttgacattttaaaacgttttatgaggtggttgttgcaaataaaccatccatcgtcatgatacgcgtcgggcgaacacggcgatttgtatgttatgcacgcgtcgaacgacacgatggacgcgaaaatgcagcgattaactctcatttgtcgcggcgccatacccacgggcactagcgccatattgttgccgttataaatatggactacggcgattttgtgattgagaaagaaatctcttattcaataaattttagccaagatttgttgtataaaattttaaattcttatattgttcctaattattcgctggcacaacaatatttcgatttgtacgacgaaaacggctttcgcactcgtatacctattcagagcgcttgcaataacataatatcaagcgtgaaaaagactaattccaaacacaaaaaatttgtttattggcctaaagataccaacgcgttggtgccgttggtgtggagagaaagcaaagaaatcaaactgccttacaagactctttcgcacaacttgagtaaaataattaaagtgtacgtttaccaacacgataaaattgaaatcaaatttgaacatgtatatttttcgaaaagtgacattgatctatttgattccacgatggcgaacaagatatccaaactgctgactttgttggaaaatggggacgcttcagagacgctgcaaaactcgcaagtgggcagcgatgaaattttggcccgcatacgtctcgaatatgaatttgacgacgacgcgcccgacgacgcgcagctaaacgtgatgtgcaacataattgcggacatggaagcgttaaccgacgcgcaaaacatatcaccgttcgtgccgttgaccacgttgattgacaagatggcccctcgaaaatttgaacgggaacaaaaaatagtgtacggcgacgacgcgttcgacaacgcgtccgtaaaaaaatgggcgctcaaattggacggtatgcggggcagaggtctgtttatgcgcaatttttgcattattcaaaccgacgatatgcaattctacaaaaccaaaatggccaatctgtttgcgctaaacaacattgtggcctttcaatgcgaggttatggacaaacaaaagatttacattacagatttgctgcaagtgtttaaatacaaatacaacaatcgaacacagtacgaatgcggcgtgaacgcgtcatacgctatagatccggtgacggccatcgaatgtataaactacatgaacaacaacgtgcaaagcgtcacgttgaccgacacttgccccgcaattgaattgcggtttcagcaattttttgatccaccgctacagcagagcaattacatgaccgtgtccgtggacgggtatgtcgtgctcgacaccgagttgagatacgtcaaatataaatggatgccaacaaccgagttagagtatgacgccgtgaataagtcgtttaacacactcaatgggccattgaacggtctcatgattttaaccgacttgccggagttactgcacgaaaacatttacgaatgtgtaatcacggacacgacaataaacgtgttgaaacatcgtcgcgaccgaatcgtgccaaattaaagcacgttaagcggatacaacgggcagtccgagctgttaaagtcaatacaaccatcgttaacaaacgaatacgcattgttgtgacagctgaggatataaaaaggaatagagaagtaattgcaatgaaatatcccgttacaattccacggcacagcgtatgttgctcgagttctatcagttgcacacaacggcctaagaaaatttattaatgcttcatttgtatctatattagaaggataatacataggttcgcccaaaggactgggagaaggcggcggcgaaggtgtaggtgtaggaggaataggagaaggcggcggcgaaggtgtaggtgttggaggaataggagaaggcggcggcgaaggtgtaggtgtaggaggaataggagaaggtggaggtgtaggtgtaggtgttggaggtataggtgttggaggaggtgtaggtgtaggtgttggaggtataggtgttggaggaggtgtaggcgaaggtggagaaggtgtaggagtaggtggaggtgtaggtaacggtacaattggtggagatgtaggtggtggtacaattggtggatttggatacaattcctgaatgtcgtctaatatttttaaagttaataaaattattataaataaatttaatattattattattattattatcacaataatgtaccacatgttgcttaaatataaaaattaaacaaagaatgttgtattattgcaaatttaacaattttttgtattctccccatgtcatgcgttcgtaatgagcgggcggttttttatttctttgtatccacttgtaatcgttaatgtggttgtgaaaagtcatactgacgtaggccattaaatttttcatgagcatattatttgacacaactgcaacatctgcgcctgccgtttcttgctggtacgaatcgacaaacgtaatgtctgtgccgtatttttctttgtcaagtgcaatttctataagctcaatgtggtaaatgatgaaacctttgacgttcatataatgatcgcggcacatggcgcactgtagtatgaaaaatacgttgtaaaatagcaccttcattgttttcaactgctgcatgacaaaatctaaactgcttttgtctcgcgtatacaccatatcgtcgatgatgagactgagaaagtgcatggtgtcccatatggtagtaaacgtgtaagtaaaactcttgggctggcacgaacgcaaattgagttctgtggttttgtccataaattctatgcgaaactgttgcaagtccatgtcgggggatgcgttaatggcccattcgatcaactgctgcacctcgtacttttgaatgtctttgtatttcatcaaacacgcaaaatggtataagtaagttgcttgcgaagacaacagtttggtgaggtgcgtcgatttagaggctcgcaaaaggtctatgagacgaaacgaatacaacagatagctgtctttgtaacgagaaaaaagcggcgtcagcggtatcatggcgactagcaaaacgatcgtgctgtacttgtgtcaggcgccggccacagcgtcgttgtacgttagcgcagacacggacgccgacgagcctattatttatttcgaaaatattacagaatgtcttacggacgaccaatgcgacaagtttacttattttgctgaactcaaacaggagcaagccttatttatgaaaaaagtatacaaacacttggtgcttaaaaacgagggtgcttttaacaaacaccacgtattgttcgatgcaatgattatgtataagacatatgtgcatttggtcgacgagtctgcgttcggaagcaacgttatcaactattgcgaacagtttatcacggccatttttgaaatttttacgctcagcagtaaaatcgtcgtggccgtgcccgtcaattgggaaaacgataatttaagtgtacttttgaaacatttgcacaacctaaatctcattggaattgaaattgtaaattaaaacaaatcatgtggggaatcgtgttacttatcgttttgctcatactgttttatctttattggacgaatgcattaaatttcaattccttaaccgagtcgtcgcccagtttagggcagagcagcgactcggtggaattagacgagaacaaacaattaaacgtaaagctgaataacggccgggtggccaacttgcgcatcgcacacggcgataataaattgagccaagtgtatattgccgaaaaaccgctatctatagacgacatagtcaaagagggctccaacaaggtgggcactaacagcgtttttctgggcaccgtatacgactatggaatcaaatcaccaaacgcggccagcacatctagtaatgtaaccatgacgcgcggcgccgcaaactttgatatcaaggaattcaagtccatgtttatcgtattcaagggtgtgacgcccactaaaactgtagaggacaatggcatgttgcgattcgaagtcgacaacatgattgtgtgtttgatcgaccccaacacggcgccgctgtccgaacgagaggtgcgcgaattgcgcaaatctaattgcactttggtgtacacaagaaacgcggcagctcagcaagttttattggaaaataactttaccgtcattaatgctgaacaaaccgcctatctcaaaaactataaatcatacagagaaatgaattaataaaacaaaaagtctatttatataatatattatttattaacatacaaaatttggtacactagtgttcaaatcgtttctgttcaacgccattgtcatgttataaaacacatttgtagttttattgtaattatttttaaatttatttttaatttgctgtaataaaacttgttcattaaatacaaaagactttgaactacttgcgtttatattctttttataattgtactgaacaaacgaggggtgcaaaaagtttttgaaatgctgcacggcaatacctatcatctcctccattttgtcctctcctattgtaatagtggcactgcgcaccgttttaatgtttagaatgtaaatgagcgcatacagcggactattgttggtgctcaagcacattaggttgtgcttatgcatagggtcgttgctcagcagcgttttgtatactacaaagcccgttttggggtcgcgtctgtacattagtacgtgcgacaaaaacaaacgcaccggcgtcacaagcgactcgtaatacatgctttctatcggaaactgtttggacttgatgtgttcgtacacggagccggcaaacttgacgctgtctacaaacttatggttcgtgtaaacaatcaaaaatctgtcttgtacaccgtcgtcataatcgtccacgtacagcggcttgttgttaacaattaacattttgtagttggcttcatactttagcagcccttggtattttctgctcttggaatcgctcttgctcgaatcggcatgcttcttaaagtacgactcgctgcattgtttcaactcgttgatagtgtacaactgcgagttgagtttgctcacttccttgtcgctcgtttccttgttggactctccgctgtggttgtcatcgtcaaacttgtgcatcaacaccaaatagtccaacagctcaaaaaacgacgacttgcccgaacccggttcgccgggcatgtaaatagccttctttccgtaatctacgggaatggccaaactagcggcgaaatgcatcaacataatcgcgttcgcgtgattaaaattggtgaagcgtttaaagtacaaatagccttcgacaatctttttcaaataattgtacgagtactccttcaagtccactttggacatgatgatgcgcatgtagaatcgagtcagccaagtgggcaaatcgtccgtgctgcgcgccaatatgattttgtcccaccacacattgtacttcttcaagatcattaacgcgtcggcgtggtgcgtgtaaaatttggaaatgttatccgattcttcaaactgaacatcgggttcacgtgcaacatcatcgcgcaattcggttaaaaacaaacgtttatcattaaacttgtccatcaacatgtcgacatattcgattttgtgaattgttcgatacaagtactgaataattttgttgtgttctttggaaaaaaactctccgtgttggttaacaaattcgctgttcgtgcgaatcaacgtggtcgacacgtacgttttgttagtaaaaattagcatccaaatcaattcgctcaattctgcatcgttaccgaacatgtccgccatcaagcagacttttagcgcttttctattgatctttattttcttgtagcatttgcattttggtcgagatcccgataccgttgaccgacacggtttgcattttaggttgtgcaacatgtcggaaaccctgttcttgtttacgtacagagcgagcgtaatcagattttcatcgtccaaattccacaaatcgcgaaacaggttgtttaacgcgactcgcatatcggcttggcatgtgttgcaattgcccatgtagttaactatggccgtgttagtttttagcatttttacatctcggcacattttggcgatgtgataagttctataaatgctgagctcgtcggcgctagtagatagcatgtaattaaacgcgtcctcgggcaaatacttttcgtcggtgggcttcttgaatgtctgcggcaacgtggtgcccaacaaaaatggacagctcgaatgaaagctgttggtgaacacgttgtacacaccgtgcgttgtcaagtacaagtatttccaattgttaaattttatgttgctcaacttgtaacaattgcttttggtcaatttgaataggtcatcctctttctttacaatttgataatgtttgccgttgaaaaccaaattgactccggtcactacgttttccaattttctaaagaatcctttacacacaatgtcaggcggcaagtttagcgccatcacattctcgtacgtgtacgcccacaattcatcgtgatccaaaatttcgtttttagccgactgagtcaaatatatcatgtagtgtatgccaaaataatagcccaacgatacgcacaatttggtatcgtcaaagtcaaaccaatgattgcaggccctattaaacactattttctcttgttttttgtaaggctcacatcgcttcaaagcttcattcaaagcttctttgtcgcaggcaaataatgattcacacaaaagttccaaaaacagtttgatgtcggtttctctgtacgagaaattttcgttcttggtcaatatcttccacagtacatagattaaaaaatcaaaatttttaaatttgcttttttcaaagtattgttgtagaaggtttggatcgttggctcgttcgtgggtcgccaaaactttaaccatgttctcgtgaattgctataagccccaaattgatttgcgtttgaatgtagtctgcattttcgctgctcgccgatataatgggtacgatgcgcggttttctggaacgcgtgtcgctcaagtccacgtcgtttttgtcaaaattgttgttctcgaacactctgaggcttttgaggttgacgttgacgatatgcttgtacttgggcaccgtaatgcattcctccaaattaatgtcgtccctaatgtaattgaaaaaatttttatccgaattgaccagctcgccattaactttgcacgtggccacagtgccgtcggccattttgagtataaacaagtcttcgtgagaatcgtcaaacttggtttttccatttacaaacagcgtttgcggcggatcgtgattcgtgcgcaggctgagctcgacgttgagaaaacatttagggtcaaacacaaacaaatccacagggcctagttttttgttgtgtatgattggtatcgtgggttcgatgacaattccaaattttatatttaaaaacagctgccatccgttaaaagagaaagcttgctttttgggccagttgggccaataatagtaatcgcccgcttgcacgcatttgttaatgtatccagggtcggtgctcttgaaaaaatcttcaaaattaatatacttttgtatgatgtcatagtgcttcttcaaaatgaaaggttttacaaaaatgcaaaaatcgttactttccaacacccagtcgtggccgtctaatgtttgagctgcgtgtttctctgcaggttcttcggtgtcttcgcaagatgcgcccatgtcgtgtttcgcgcacggaccgttaaagttgtttctaattgtgtttaagaactgttgaaagttgttgacgtactcaaacaatctacgtgttcctgttcgcgtgtttctaatgattaaatgatttgcatcttgcaagttgttaatctcgtacgttttgtcttgaggcacgtttttcaaaaaaaattgtaaaatgttgtcaatcatgttggctatcgtgtttgtacttttcgtgttaatttatttaataatttcgatcaaaaatcaccatccattcttacatagaatagaaacgctaatacaagatttcaacaacacattgttgtttggcgcgtatgtacagatttacgatttaagcacgcccgcccgcaccgaacgattgtttattattgcgcccgaaaatgtggtgttgtataattttaacaaaacgctctattattacttggactcggcgaacgtgttttgtcccaacgagtttagcgtgaccacgttcacgcaatccactattaaaacgatcaacgagacgggaatatatgccaccgcatgcacgccggtcagcagcttgacgctaattgaacattttgcaacattaaaaaataacgtgcccgatcacacgctcgttctcgatgtggtcgaccaacagattcagttttcaatactcgacattatcaattatttgatttacaatggctacgtggatttgttggccgaataacgcgtatatagacgcttgtacgttcatcgtagtaatcattttaatacatttgattgaactaaacatacatctgcaatgggtgaaagagtcactaaattttgcaatggaaaacggcgataaagaagacagcgacaatgaatagagtttatatttttatttaataaaatattgttcgtaatccataatgttttgtattatttcattgtgataatgttcccaatcttgcacgggggtggggcatcgtttgactttgacgtagaaatcgtacgcgtagttattagttggcagatcgtcgacaagtgtgatcgacttgaaaaagtttacatttttatcgctcaaatatttaattacaatttttggcgatttgggtatattgttgtcggatcgatgattgtgaatgtcaaaaacaaatttattttcaatgaaacgcttttttaaattgtaatctacaatagcgttgtgtgaattttgaactaaatcagagcgttcttcttgaacggtggaaccttcgctgataatgatatcaaaatagccttccaaatcgacgtctcgcatcgagtgtgctacatgatctctactgccatacgaccacaagactaaaacgcaacccatctcgtgcaactcctgcaagctgtcatacacaaacggatctcgaatctcaacttgctcctcttcggttatgagagtgctgtccaaatcaaacacgaccacgtgcggaaatccccacgtcaaagattcgcttttgagagagaccactttgtagtgtggcaatagaaaccattctttaagaaacgaatacattggcggtttgttgctaagcacgcacatgtggcccaacactggcgttttgaatgcgcgtttaatattgtgcctgatgtcgcgcatgtcgtcggcgggcgctttgaatatttgcatacagtaattgtaattgttttctatgatcttgcacagctgcgggtcgttgcaaaattgaaatattacatattcaaaaaatttatacttttcaaagccaaggtatttgaggtcggcgtactcgcttaaaacgagaacatgtcgtttgatgatggcgtcgttaaggcgcaaacagatccatttgctttgaagcgaggaggccataatgtacaaaaatggaccagttacgccttatttaaactgtttaaagagtttcgtataaacaaaaactactctaaactaatagatttcttaacagaaaattttcccaacaacgtcaaaaacaaaacgttcaacttttcgtctaccggccatctgtttcactcgttgcacgcgtacgtgcccagcgtcagtgatttggtgaaagagcgcaaacaaattcgattgcagacagaatatttggcaaagctgttcaacaacacaataaacgatttcaaactgtacactgagctgtacgagtttatcgaacggaccgaaggcgtcgattgctgttgtccgtgccagctattgcacaagagtctactcaacaccaaaaattacgtggaaaacttaaattgcaaactgtttgacataaagccgcccaaatttaaaaaggaaccttttgacaacattctttacaagtattccctaaattacaaaagtttgttgttgaaaaaaaaggaaaaacataccagcactgggtgtacacgcaaaaagaaaatcaaacacaggcaaatattgaatgataaagttatttatttacaaaacagtaataaaaataaactatttgagcttagcgggcttagtttaaaatcttgcagacatgattttgtaacagtcgaaagccaaacgagggcaggcgacgaaatcgcttcgttcattcgctactgtcggctgtgtggaatgtctggttgttaatagtagcgtgttctgtaacttcggcgacctgtcgatgaacggctcctggatcttctgtatgtgcggggtctacccgggcggcgtctgtaacccgagcttctgcgcctgcgtgtcgaaccatatgtggtaccggttgaagaacggcgacggcgacgataaaccatgtttaaattgtgtaatttatgtagctgtaatttttaccttattaatattttttacgctttgcattcgacgactgaactcccaaatatatgtttaactcgtcttggtcgtttgaatttttgttgctgtgtttcctaatattttccatcaccttaaatatgttattgtaatcctcaatgttgaacttgcaattggacacggcatagttttccatagtcgtgtaaaacatggtattggctgcattgtaatacatccgactgagcgggtacggatctatgtgtttgagcagcctgttcaaaaactctgcatcgtcgcaaaacggaatttcggtaccgctgttgatgtattgttgcggctgcaacatttgtatcttttcgccgcgctcgatcaacaattcttcaagagtggtgcgtttgtcgcgctgtaaagccacgttttgtaacagcactattttcgcatatctcataatcggactgttgaaacagcgtgcaaacgacgaccgcataatatcgacggtcgtcaagtcgattgtggtcgaaggcatctccaacagagatcgcacggcgtccaacagcgtgtccgtttgaacctgcgtcatttgcggtctgcacgtgtagtcgtcaaacgtggtttcgagcagtttgaacaacgaatgatacttttccgatcgcagcaaaaatatcatggtcatgaccacgtcgctgattttgtattctgtagaactggtgctgttcaacgaatagtgatggattagtttgcgagcagcatttctgtatcggcgcatgttgatcaactcttcggaaggctgcgcgggcgcggcggcgttggctcgcgcaaacaaatttattacgggacgcggcgtaggctgcgcggacgctggcgcggcgacgacgtccgcgtttcccgccgcgtactgagacgctatggcagcgttgttatttaaaattgtgttttgcgatttgcgagccacgtgcatcataaaatttatcaacacgtcggtgttcaactgcacgctttgatgttcgtcgcagagcaaaggaaatagctggggccatatcgccaattgcataggctcgtctatttttaaccgcaatttgtttatttccaaatacaacgcgatagcgctcatcgtgaccgacgacgcacacttactctgtaactatcacttggatcgtgttgtcgtaaacgcttcccaaaaagtctaacacgttgaccgtttcgattctattcaacttaattgtggacgcgttggcttgcatcggttccaacagactgcgcgctccgacagattgagtagacaaaatttttaaactttccgtcttattgggcgtaatgtcgttgattaacaacgacgcagccgtttgagaggccgcagtgttgatggtttgcaacatgtcgacggccgccatttgcgtttgcgccgaaggtcttgctggcggcctgttgcggcggtttcttcgtgcttgcgacatgttgtcgtcagtgtccatatcggtatcatttattgaagcaatcatggttgagttcgataagcagagatatttcgttgtccaattggtacttggtaatgatgtgccttataaatgtttcgggcacaatcatttctgtcattagcacgttacaaatatctattttgatcaatttcaatttatgaattaacagattaatgttttcgtccgagtacttgctcatgatgaaacgacaaacgttgcggagttccaactccgctaccggatacgctttgttgggcaaactctctaaatagtgtctcaaataaaagccgatcaatacggtggacgctattttgttaacctttttcattttagtattgcggcccatttctatcatgaagtttttaaacggtagcaacagcctgtctccgttagcaacagtggagcagccgttgcattgcgcgctcaaaatactcaacacgcgctcgtgatcttcttggcgcaatccgacggttgcttttttgcattctttgacaaatggcacgcacatgtcgcgtttcgtgtacaaagaatacgctttgtcgcaaatcaagttatagaaaaattgcacaaatatctgcgtaatcaagttgttttcgttaataatgtcactttcgtttttgtaatcggttcgaagcaacacgtacaacatcagaggcatgccgaacatgggtcttaaaaaaatgtcccaaccattttgcaagcccgcgtcgagggtgctcagcgaggacgccaagtatttgcatttgcactcaaaacattgaattttgtttgcgggcttgcacgactgacacatgatcgcatccacgtcgggtgccggcgtcggattgtaatatttttgcaagtattgcataatggtcctaaaatggggtacctgtttgataaactcgtcgcgcaaaaatatcgaaaaaatgttttttacattgtgtatgttgtctgtgttgttggcttgattctcaaaactactctttatggaaacaatacatttgttaaattctgtgaaaaaagtaagacctttactgtccacgatcaagctttggttgaaatattttgaaaataaaaaacacaacgaatcgatttcatcttgtaacaattgcgcttcaaaacacacgttttcaaagcggtcgtaaatgttaaaccttaaactgtattgtaatctgtaagcgcacatggtgcattcgatataaccttataatatgaacgattccaattctctgttgattacgcgtttggcagcgcaaatactgtccagaaacatgcaaacggtggatgtgattgttgacgacaaaacgctcagtttggaagaaaaaatagacacgttgaccagcatggtgttggctgtaaatagcccgccgcaatcgccgccgcgggtaacatccagcgacctggccgcatcgatcattaaaaataacagcaaaatggtgggcaacgattttgaaatgcgatacaacgtgttgcgtatggccgtcgtttttgttaagcattatcccaagtattacaacgagacgaccgccggtttagttgccgaaatagaaagtaatctgttgcaatatcaaaattatgtaaaccaaggcaattatcagaacattgagggttacgatagtttattaaataaggcggaagagtgttatgttaaaattgatagactatttaaagagagcattaaaaaaatcatggacgacacggaagcgttcgaaagagaacaggaagcggagagattgagggccgaacaaactgccgcaaacgctcttctggagaggcgagcgcagacgtccgcagacgatgtcgttaatcgtgccgacgccaatattcccacggcatttagcgatccgcttccaggccccagcgcgccgcggtacatgtacgaaagttcagagtcggacacgtacatggaaaccgcccgacgtaccgccgaacattacaccgatcaggacaaagactacaacgcggcgtacactgccgacgagtacaattccctggtcaagacggttcttttgcgtttaatcgaaaaggcgctggccactctaaaaaatcggttgcacataacaactattgatcaattgaaaaagtttagagattatctgaatagcgatgctgatgctggagaatttcaaatatttttaaaccaggaagattgtgtgatactgaaaaatttgtcaaatttagcgtcaaagtttttcaacgttcgttgcgtggccgacacgttagaggtaatgttggaagcgcttcgcaataatattgagttggtgcagcctgaaagcgatgccgtacggcgaatagtcataaaaatgacgcaagaaattaaagattcgagcacgccgctgtacaacattgccatgtacaaaagcgattatgacgccataaaaaacaaaaacattaaaaccttgttcgacttgtacaacgacaggctgccaatcaatttcttggacacgtccgcaaccagtccagttcgcaaaacttccggcaagagatctgcggaagacgacttgttgccgactcgcagcagcaaacgtgccaatagacccgaaattaatgtaatatcgtcagaagacgagcaggaagatgatgacgttgaagatgtcgactacgaaaaagaaagtaaacgcagaaaattagaagacgaagattttctcaaattaaaagcattagaatttagcaaggacattgtcaacgaaaagcttcaaaaaattattgtggtcaccgacggtatgaaacggctgtacgaatactgcaactgcaaaaattctttagagactttaccgagcgccgctaactatggcagcttgctcaaaaggctaaacctgtacaatctcgatcatatcgaaatgaatgtaaatttttacgagttgctgtttccattgacactgtacaatgacaatgataacagtgacaaaacgctttctcatcaattggtaaattacatatttttggccagtaactattttcaaaactgcgctaaaaacttcaactatatgcgcgaaacttttaacgtgtttggcccgtttaaacaaatcgactttatggtcatgtttgttataaaatttaactttttatgcgacatgcgtaattttgccaaattaatcgacgagctggtgcccaacaaacagcccaacatgagaattcacagcgtgttggtcatgcgggataaaattgttaaactagcttttagtaatttacaatttcaaaccttttcaaagaaagacaagtcgcgcaacacaaaacatttgcaaagactaataatgttgatgaacgcaaactacaatgttatataataaaaaattataaaatatttttaatttttatttatattcagtacatttacacatattaacatattgtttatacaaattcttataatcattatgatttaaattgaattgttgtctaaacaaattaaacactttattaaacaataacttttcgttgtaattttttactttgcacatgttataacaaaaaattaaaattttcatcatgtctgatttgtctatggcgtcacagttgcttttaatgtaatcgcaagttaaccactcaaaaggacccttttctatttttaatttgtttaaatctttataatcagacttcagtttgtaaattagatttccacatcgaataataaatccttccagcgggctttggggaaacattaaagacttgaaatttaacctttctacaaaatcgttgtacaaatatttgtgacacggaatagtattaaaccccacgttagtcaacaactcttgcgcctccacaaagggcacaaactccccgccgtataattgaatttcgtaagcgtagtatttcaaactctctttctggtccacgtagttaattacgttaatgggtgtcgtttttgcgtcgtctttccaacccattaattcgccgtagacaataaaaccgtcattgaaccgcgcctgaagcgatcgcatgcacgtttctaaatcttttcgaatgcggtaataattcataaaattgccgtccggtctgtaagtgtttcttgacccgtacgtaattttattttggttgcaaatgattctgaaattacaaccgtccaacttttcttgaacaataatttctttgtcggccaacgtaccttttttaccttgatctagatgcgacacagatggataaatttgatacacaattttattctcatcttcgggcattacgggtccgcgttcatttaacgcgtacatgacaatgttgtggcgaatgtcggtgcgctccggcggttctggcacgtggtgcagtctgtcctgcaattgttgcttccattgttgaaaatattcggtccattcttgttgatactcgccgcgttgcatgagttttacgtacagttttaaaagtttgacattctttacaaataacgttagagtttcgtcgattttgtatcctccattatttttgtttaaatccaatacatttaaatcgttcactaccagttgattgtttttatccatcgtaatttttatctcatcgcccacgttgaacaacatgtttaaaattttggtggatttcggcgcacgtttataatctaaataatattcaacgtacacgtaattgaacatgagctgcaacaatcctttggcattgttcaaaattttgtatctcatcaaagtataaataattttcaccatcgacaccgtcatcaacttggttacaaactcgtacaattgcaagttttcaataccgtatttgtctttaaaatcttcacgtttactgaacatgcttaattcgggagattttccagtcaaaatgccaattaatcccgtgtacaagtcaacgtatttgacatcgttgcccgattcatcttttgcatgtcgatttttcaaaagctctttattgtcgataaatttttcaaaggtctctcgatcacatttagtgtaaatatggtagtcagtgtcgctgctttcgaccgcgtatcccttggcatggctgcccgtatcaatgcaaatgtacaccatgttagaatgtgctgcttactgtgcctgtatcaagccttatatacctcaaaatatttcacatttttgcatcatcgtaaaatatacatgcatataattgtgtacaaaatatgactcattaatcgatcgtgcgttacaagtagaattctactggtaaagcaagttcggttgtgagccgtgtgcaaaacatgacatcataactaatcatgtttataatcatgtgcaaaatatgacatcatccgacgattgtgttttacaagtagaattctactcgtaaagcgagtttaaaaattttgtgacgtcaatgaaacaacgtgtaatattttttacaatatttaagtgaaacattatgacttccaataattttgtggatgtggatacgtttgcaagacaattgattacagataaatgtagtgctctaatcaaagtgcggatctgttgccggcaaacattttagagattgtagagaaggccagagacaagtattttgagggccaactcaaaaaaactatgaatacattaaaaaattatttttacgaaaaaatatatggacgattcgatagattataaagattttaacagacgcatcctattgatagtttttaaattcgctttaaacaagagcacaatactttccatcgtacaaagagatcatcgagtggccattaaacgtttaaacaaaattaaccccgatttaaagagttctccgcgcaatgcttcagcattacaatgaatgtttggaaaatctagacaatccagtcacggacgaacatcatttgttgacaaaagagttgctacaaaaatatttatcgaagcgtttgaatacagttacaccaacactaatgccatcagcatggacaaaacagatgaatttgattttattaaaccggcattgaaacctttgccagatgcaagaccgccatcgcttttggccaacgtgatgaacgaacgtaaaagaaaattacaaaacaccaactcaacggcaaaatgtttgctaccagcaccaccgccacaattgcgtaaacttgaaaaaaagaatcatttattgcctttgttttctttgtaattatattgttgcatttctatttctaatatcatagttttctaataaagtagtttcatatttttgtttttgtacagtaattgtttcttggtttaacaagatcacaaccaataacataaagaataacacaatcataacaaaaattaaaaagccgcatactactagaacaaattctttaattagcgatcggtttctatttacaaattggccgagctgatcgccttcagtcggcgagttgtgggcttggatgatgtcgacgatattgttgccggcgcgaccgcctgtcgctctcgatataatgtcggccgccgtcggtttcatgatgtgcttaactacaaataatagttgtacttgacgggcgtcaccgtgatgccgctgctaaaacctccgtccgttaagacgcgttgcgttacaaaattaatgtttgtccgattagcgtagtcggaataatcaaacgtgttgggcggactaaaatcgggcatgttgatgggcacaatgccgctggagctgatagcaatgctgtcgttcttgcaaaacagccgaatttttttgtagggctctgctttattcggcgcagacgacaccatctggtcaaagttgttcaattttatgattacgttgggtaccaattgataggggaaaattattttctggaacattttgacaaagtccacaaccgtttggctatagtcgggaatgccgagcaaagactgcgcctgtttaatgtatttgagactggagcggtttactgtagcgcaattggatggcacgtcgcccttcataagccggcgcgttctctcccaattcaatttgttgtacaaattatcaatctcctcgtgcggcagattgattacatagcgcgcgggctgtttgcgatattgaaagatgcaaaaaatgcgtttcaacgacaatatcttcaccatggtggacgtttccagattgaaacataacaaaaagtcattgctttccaccaattctttaaaatgagacagcggaatttcacaagcgatcggtcgcaaattgctttttattggaggcggaacgctttgaccgttgcggttttttagtaacgcgctgcacgcagattgcatgtccgtttcgggatacgtaaactcgatgggacatttggggttttcatggtgaacgatcatagtgttgcaataaaacaagttgttggtcaggagcacgctaaaaacacgcgtttcgcccgcaccgatttcggtgatgggtaccaacgggttccagtagactatggtggcggacgctgttttttttggcgatcgactgtctatgttaacatcatgctcgtgcctgtacactagcacagaattgaattttggaaattgttttttgtcaatgtacaaccggtcgtcgtctgtgggcacgtacacgatcaagttttcgattaatttgttgcctacgtcgctttgcggttccaccaaattgtgagggaacgcaaaaaagcgatcgctaatacaaacttgaatctgaaacgggcactccatcgtgatgtatatgtcttacttcattagactttagattattttaatttgtgaactcgtaccgtattcaatagggtgtcgggcacgtaattgtaatggtaaaacagatcctgttgaacacgtgcgttgttcactacgattgaaatgcaaaaatacatcaagtacataaacactatgattagaaaggtagcagacagaaaatatttcatctttaaatcttatgctagttgaataaaatacatagtacttttatacgtttatttatatttgttttctttgttataaccgtaattgtaaaacttgtgatcgtgctcgccaggcataatttctttgcacatcagcttgcgaatatatgtgacatcttcgtacaccgatttcttgatgttaccatcgtgaagcgttgtcggcttgagaggtttgcggtcgttgttgtaaaaattttgcaccgaataattatccatagtgcagcacaggcaatgtcactgatgcatatgctttaattttttattgcattcagttattatatgatttaataaacgtacacaatagcacgtttatcggttaaagataactttcaatatataaaagtgtttgaattgcgagaccgtcaacataacgtttatcaacgcgatgactaaacgacaatttgctttgctgtttgtgtggcaccacgacaaccaatttgtttgcaacacggacgaatacccgttttggcacaacattgaataccatgcacggcgctataaatgcatcgttttgtactgtgtggaaaacgacggatcgctacaactgcccgtttgcaaaaacataaatctcataaattataaaaaagcgtatcctcattattatggaaactgtgttgacagtatagtgaaacgtgctggcaaaaattgattatatgaaagtaactgcaatgttaaacccccacctgttggacgtcgcgtacaattatttgctgttgatggacatggattgtgtggtgcaaagcgtgcaatggaaacaattgtcaaccgacacgtattgttttgagccgttttacgactctcaaattaaatggttgtacgcgcccaaaagcggacaaagttttgatagttatcttgaaaactatgcaactctaattcgagtcaaacaagtgcagcaacatcgaaaagaattaatactgcattgtgtggattttcttacaatgaaagcaaatgacaattttatggtgttcaaaaattatattaacatgattataaaagtgtatttgcaattttacaattacagatttcccatcaattttgaggacaacacgatgaaaccttgtgtaaatttaacttttagacgtggcggcagttggaaaactcaactgcaacccgtatgcaattatgtttacaaaagtaaaaatatgccaaaatttattaaataaaacaaattaatttaaacaagcgtttttattgacaatactcacatttgatattatttataatcaagaaatgatgtcatttgttttcaaaattgaactggctttacgagtagaattttacttgtaaaacacaatcaagaaatgatgtcatttttgtacgtgattataaacatgtttaaacatggtacattgaacttaatttttgcaagttgataaacatgattaatgtacgactcatttgtttgtgcaagttgataaacgtgattaatatatgactcatatgtttgtgcaaaaatgatgtcatcgtacaaactcgctttacgagtagaattctacttgtaacgcatgatcaagggatgatgtcatttgtttttttaaaattcaactcgctttacgagtagaattctacttgtaaaacacaatcgagggatgatgtcatttgtagaatgatgtcatttgtttttcaaaaccgaactcgctttacgagtagaattctacttgtaacgcaagatcggtggatgatgtcattttaaaaatgatgtcatcgtacaaactcgctttacgagtagaattctacgtgtaaaacacgattacagcacttcgtagttgtatcgaaaattgttcaatggctctttgttaatgtcgtaattgattaatatgtcgtacaatttggcggcgttgtgtttgcacacgaccgtttttagttcttgaaacattttttcgtgtatgtttagcatgttgtatttcagagtgcgatgtgtaatgctggtgacgagcatcaaaatgataaaatctaaagcggctaatttgtaatcccgttcatacgctctgtaatcgccaacaactctgtggccagatctttttagattttgacaggcgttatggtacgaattgataatatttactatagtttctcttgttatcggtttgtcgattaaactgttaacaaacatcacgttgcccaagcgcgacggtttagacaccgacttgttttttgtctgttcaaatttgtacaaattaaaaacgctcatagactggtcgtcaggcagtgtgtcgttatacaaacaaaatggtaaaacgtttaattcgacaaacgacgagcacattaaagtttgttggctgttaacgtcctggggatgtaaactgttattcataacgtaacacacttcaatgtcggaatgcttgttttcaaatttgtccttgtctacagtttcaatggtgattgagcgaggtttgagtttattttctaaattcatttggatattttcaatatggtataccaccgacacgttgtgagccagcgatccttgattggttttaatcatattcaaaatattcatgatatggttgaaaaaagagtctgtcaaaacgtttgtgtcgttgttaaatatcgctttccagggtttactgttgcgtgactcaacgacggccgtgtaacataacaagcgcgccagttgcatgtgcgacaacttaatgttatcaatgtcggtgatgtttggcaccagattttcattgccgtcttccagtagcgtgctcagttcggtcgagtagttattcaacgatcgattgtgcgattcaaacaagtttactatcgcaggttgtacatagttttttatgtcgtcaaattgaattatatcgatcttgtccttgttctccagcataaacgacaaattttttaggtcgaatttaatatttggcgcgttttcgttggactttttgtaatttaacaacatcgccaacagtttgtgtaactcgccgttagcttgatctttgctaaacagtttattggtagcgtaattcacgttgtcgttcaaaaacagcaactcgttgatgatcattttttgtaaaagcgcgtacttgctcatgttgacagaatctcttacatttcagttgtaaacgcgtctgtacaaattggccatgcgattcggaatgcacacggggatcgtgcgagccagtgccgtttggcgaaatagcattttttcatagccgctcgaacaatcgcacgcgtccggcgaaaattgcaccgtgttcaaattcatattcaaccggccgtcgttgcatagataaggcctcggtgttcccgtatcgtccaccaagtctctgtacgtgctcacgcatgtttgagacacgacaaaatctccgccggcggagaaaacgtgaaccaagcccagtgcgggatcgcattctatcaagtccggagcctgcgcgtttaccaaagcgtcggaggcgttgcaaaagccatcctggcaggtcaactcgtttgcagcgctggagatcacgcagttgtctctacactgctgatccgtcacgcacggtaaccggttcaatgaacaatctacgcctcgattgcgctgaaacgtaaaatttaacggcggcgcttccaactcgttaatgtgcatgtatgcatcttgcaaaataaatttttgaacaaatttaaacgtgtacatgtacacgattagtataattaccagtagaataagtatttgccaaaagttcaacatgatcgtcttaactgagtgtgaaaagcgtggtgtgacgcacgaaatgactggttgcgcaaaaaataaaccggggtctatataactcggcgtcgaccgcgttcatttttaccgtcatgcatctgacggctaatgtattgctcgttcctaacgcgctcaaaaagcgggacgtgaaatacatttataatacctatttgaaaaattacagtgtaattgaaggtgtgatgtgttgcaatggcgattgtttggccgtggtggtgttggaccgaaatcagctgcaaaacacggacatggaagtgttggagagtttagaatacactagtgacaacattgaactgttatgcgaaaaaatatgtgtgatagttgataattacgacaagtattaccaaaaaaattgtgtataaataaaataccaaattttattatatcattttgttttatttaataattaaagaatacaacgccacatctattcctagtacaacaaataatttgattattatttttgagtgcacattaaaaaataacaaacagtgtaaaaatactacagaataatacaatacataaatattatagtaaatagctgcaattttgatagcgtaatttatactttgatatttttcaacgtacaacgttaaatgttgatacgcattattcacaaataacaaaatttttctaatatgccatttgtccgcaattgtttttgcgatatcaaagcctttttcaaacaattgaaaaattgcaaacaaaaccacgtacatgacgttatacatagtgttaaagtttttacataacaattctataatgaagaaaattgctaaacacggcatgagcgcgcacataatcgcgttggccgcaaatatctcgtacgtacaaaaatactcggacattctccaataagtaaaatgcattttgctattatactgttgtttcttctagtgattattgcaatagtgtacacgtatgtagacttgatagatgtgcaccatgaagaggtgcgttatcctattacggtttttgacaacacacgcgcgccgcttattgaaccgccgtccgaaatagtaatcgaaggcaatgcacacgaatgtcacaaaactttgacgccgtgcttcacacacggcgattgcgatctgtgccgcgaaggattagccaactgccagttgtttgacgaagatacaatagtcaagatgcgtggagatgacggccaagaacacgagacgcttattcgagcgggagaagcgtactgcttggctttggatcgagaacgcgcccgatcgtgtaaccccaacacgggtgtgtggttgttggccgaaactgaaactggtttcgctcttttgtgcaactgcttacggcccggacttgttacgcagctcaacatgtacgaagactgcaacgtgcccgtgggctgcgcgcctcacggccgtatcgacaatatcaacagcgcttcgatccggtgcgtgtgcgacgacgggtacgtgagcgactataacgccgacaccgaaactccgtattgccgtccgcgcaccgtgcgcgacgtaatgtacgacgagagtttttttccgcgggcgccatgcgcagacggccaagttcgtctggatcatccggcgctcaatgatttttaccgcagacactttagactcgaagacatttgcgtgatcgacccttgctcggtggacccgattagcgggcaacgcacatcgggacgcttatttcaccaaccaaccgtaaatggtgtgggaatcaacggatgcaattgtccggccgatgacgggttactgcccgtgtttaatcgacacaccgccgacacgggcatggttagacaaagcgaccgcaccgtcgcgaacgcttgcttgcagccgtttaacgtgcacatgttatcgttgcgtcatgtggattacaaatttttctggggccgcagcgaccacaccgagtttgccgacgcggacatggtgtttcaagcgaatgtcaaccaactcagtcacgaacggtatcgagcgattttgtactcgttgctcgagtcgcacccggacgtaacagaaatcgtaacagtcaacatgggtgtcatgaaaatttccgtgtcatacgataccacattgaaaaatatactattaccatcttctgtttttaggctatttagatttaaagaaagtggcactgctcagccggtatgcttctttccaggcgtaggacggtgcataaccgtcaattccgattcgtgcatcaggcgacacgctggtggtcaagtgtggaccgcagaaacgttcaccaactcgtggtgtgtactgagtcgtgaaggtacgcatataaaagtttggagtcgcgcgtcacgatatccacgcggagacgcgcctgcagcgttaagattgcgcggcttctttctgaacaacgatcgcgaacgaaacacaataagagcggtcactacaggcgacatgacccaagggcaacaaatagacgcattaacccaaatacttgaaacttaccccaactactctgtataacaacatgagcattttaaaagttgtagaagcgtgcaatttggcacacacttttttaaaattgggttatttatttagggccaagacttgtttggatatcgctttagataatttggaactattgcgtcgaaagactaacataaaagaagtggcagtcatgttaaacaagaaaactacagagtgtttgcaattgaaacgaaaaatagataaaaaaattgcacaacgtgttttaataaaaatttacactatcaaatgatgacatcataacgggttcaatattctgtgtgcaaaaataaatgacatcatatttcaaacttgttttacgcgtaaaattctactggtaaaacaagtttgagatatgatgtcatcatcacaaataatagtatgtaataaaataaacatatttgtgtgtaaatataatttattacaaataaattttacattgaatcaatctgtcttcgtgtttgttgtaaggtcttcgaatcttgtgtttcagcccctcgggatggtcaaaatgcgccgtagtaattgttaatggatctttcaacgattttttgcccatggcgagtgtgacaaacgcggccacgacaaacagcaggataatcagtttcatggtgttctatattcgacaatatatgggtcgcttctaaatcaccttgtccccaaaagcctcttttatagttttttagaacacgttgtgtattccaacagtaattgttccatctctttcaacagccattcagcatccggtcgttgactgtaatcatgctgaattaatttacaaacaatttcggtcaatttaggatggccttgggataaacttgccggcatttgctgtacattgtttctaaagttagttagcgtagtttcgcgttccaaagcagtcttgaagggcattatcaattcgaataaaacaatgcccaaactatacatgtcatttttgggggtgtacacttttttgatttgttctggtgcagcgtacaaagttatattttgagggttgtttttgataaacgttttgtatagactgccaaacatgccgcccacatacaaatcaaagtcgggcccagtcatgaaaatatcttcgggattaatattgtggtgcacgatatttacggaatgaatcgctttcacggcgctcaccaaatcaacaaacttgctaatataaaagccaaaatccgccggaactttaatgttggtctttgcaaaagtttgcaaattgcgttgtttcaaatagtcgctcaacatgtactcgtttagaggcgacgcaatatatatgcggtgctgccgcggattcaaataaaccaattgttcgggtttcatggtatacagttaagtgttaacgcgtcactaaattcagacacgagcgcacgccctatatacatacaatttatcgcacaagatgcttaacgcgatctgtttataaactaaaacgcactgcaataaattttagcaagcatttgtatttaatcaatcgaaccgtgcactgatataagaattaaaaatgggtttgtttgcgtgttgcacaaaatacacaaggctgtcgaccgacacaaaaatgaagtttccctatgttgcgttgtcgtacatcaacgtgacgctgtgcacctacaccgccatgttggtgggatacatggtaacattcaatgactccagcgaattgaaatatttacaatactggttgctgttgtcgtttttgatgtccgtggtgctaaacgctccgactctgtggacgatgctcaaaaccacagaagcccatgaagtaatttacgaaatgaagctgttccacgccatgtactttagtaacgtgctgttgaattatgtggtgtttttggacaatcaaatgggtacaaattttgtttttgttaacaatttaattcactgttgtgtactttttatgatatttgttgaattgcttatcctgttgggccacacaatgggcacgtacacggattatcaatatgtcaaatcgtgttatatggttatattgtttgtttcagttatgagtgttactattgttatgggtttagagtgtttgaaaacgaaactaattgataacagtttgatgtttaacgcgtttgtgtgcgctttgtacattgtgattgcaataatgtggtctttaaaaaataatttgactagttattacgtttcaaatttacaaagtattcaagttgttccgttttcatacaacgatccgccgccaccgttctctaacattgtaatggatgacataaaaaataaaaaataatttataaaaatgttttttattctttcacaattctgtaaattctaaacaaaaaatataaatacaaacttattatgttgtcgtctaaataaacatcaatttgtaaatctggacacctattcatatcattgatattacagtctactatacaacaattaaaactaaccaaattatctttacaacaattaaagcaattaaaacaatttaaataatcttcattgtcgtcgtataagtttatttgcactgtagacggtgttacacagcgatccattcgacgttcgtgttcgatcaactttctcgccaacttgtaccataaaaattgtttggacaaaaagttttccaacaatggtaacggccaattcaacgtgacgatgcgcacgtcctcgggtatgcatttgttaaaaaacacacagctcgctttaccaaacgaaagcaaaggtactaaatatggcgccattggctgatttgttattccaagataattacaaataaactgatccgtcgtggggtgataactggcaggtgtcagctttaaataatcttcaacgttgttgtcgcgcaaaagtctgcattttacacgcgttgttaatcccacgacttttgcatgtaaaatcggatccaaatactgcagaatcgtgtctataatttctaatggtaaacgtatgcgttttgctcgtgggcgctttgtaacgctcgacatcctaataacaactaacacaaaactaaaatgatactcaatatattgcttttacagttcatctttaggtttaaactgtgcgtttatcgcgttgagcaagtcgccgttatcggcatcaatctcccaagcaaacaggccgcccaatttatttcggtcgacatatttaacttttcctaacacagagtcgacgctgtcaaacgaaatcaaatcacctttacttttatcgaaaacgtacgacgcttgagcggcgctgtcaaacgtgtacacataattgttgagatctttttgaatttgacgataatctacaacaccgtcctcccacgtgcccgaccccggcccgttgccagtgccggaaaaatagttgtcattcgtataatttgttacgccggtccagccgcggccgtacatggcgacgcccacaattattttgttgggatcgacgccttgtttcagtaacgcatcgacagcgtagtgtgtagtgtatagctcttccgagttccaacttggcgcgtagactgttgtttggtagcccaaatccgtgtttgaccaagcccctttaaaatcgtaactcatgagaaatattttgcctaatgacttttgcgcttcggcgtagtttaccacggcaatcttgtcgtaacccgcgcttatagcgcttgttaattcgtaaaccctgccggtttgcgcttcgaggtcgtctagcattgcgcgcagctcctccaacaacaaaatgtatgttttggcgtcaccgtccgcatcgcccaacgacgggttagcccctttgccgcccggaaactcccaatcgatgtctacaccgtcaaagaatttccacacttgcagaaattccttaaccgaatctacaaaaacgtttcttttttcaacatcgtgcataaaataaaatgggtctgatagagtccagcctcctattgaaggaagaatttttaaatgggggtttgctaattttgccgccatcaactgtccaaaattgcctttatacggctcgttccaagcggacacacctttttggggtttttgtacggcggcccacggatcgtgaatggcaactttgaaatcttcgcgtcccttgcacgatctttgcaaagattcaaagcttccgggtatcgttttgagggcgtcgtttattccatcgccgccgcagatgggtatgaaaccatacaacaagtgtgataaatttggcaagggaactttgtctacgggaaagttgcgcccgtacacaccccactcaacaaagtacgcagcgacaattttatcctctctcctgccaggtttgttgttttccagccatgtgtattcgagcggtgccagatggccgccgtcggtgtctgcgactttgaccaacacgggatcgctcacggaacagccgtcctcattgcaaagtttgacacgcatgttaaattgcccgctcacaagaactttaatggtagcccttttactttcggcgtcgcctttccatacctgctgctcgtcaaacaacacgtacgctatgtcgccaatgtcgccgttccagacgttccaactgacttgaacgtcgacttgttctttaggctttattaaattttcgtaagcggtggcctcgtaatttatttctacgagcgcataattgcgatcggcccaatcgatcaccggcgtgccgggaatcgcgttagaaacggcgaccaaccacaaaacgtttaacaatttgtacaacattttaatttatcttaattttaagttgtaattattttatgtaaaaaaatgaacaaaattttgttttatttgtttgtgtacggcgttgtaaacagcgcggcgtacgaccttttgaaagcgcctaattattttgaagaatttgttcatcgattcaacaaagattatggtagcgaagttgaaaaattgcgaagattcaaaattttccaacacaatttaaatgaaattattaataaaaaccaaaacgattcggccaaatatgaaataaacaaattctcggatttgtccaaagacgaaactatcgcaaaatacacaggtttgtctttgcctattcagactcaaaatttttgcaaagtaatagtcctagaccagccaccgggcaaagggccccttgaattcgactggcgtcgtctcaacaaagtcactagcgtaaaaaatcagggcatgtgtggcgcctgctgggcgtttgccactctggctagtttggaaagtcaatttgcaatcaaacataaccagttgattaatctgtcggagcagcaaatgatcgattgtgattttgtcgacgctggctgtaacggcggcttgttgcacacagcgttcgaagccatcattaaaatgggcggcgtacagctggaaagcgactatccatacgaagcagacaataacaattgccgtatgaactccaataagtttctagttcaagtaaaagattgttatagatacattaccgtgtacgaggaaaaacttaaagatttgttacgccttgtcggccctattcctatggccatagacgctgccgacattgttaactataaacagggtattataaaatattgtttcaacagcggtctaaaccatgcggttcttttagtgggttatggtgttgaaaacaacattccatattggacctttaaaaacacttggggcacggattggggagaggacggatttttcagggtacaacaaaacataaacgcctgtggtatgagaaacgaacttgcgtctactgcagtcatttattaatctcaacacactcgctatttggaacataatcatatcgtctcagtagctcaaggtagagcgtagcgctctggatcgtatagatcttgctaaggttgtgagttcaagtctcgcctgagatattaaaaaactttgtaattttaaaaattttattttataatatacaattaaaaactatacaattttttattattacattaataatgatacaatttttattattacatttaatattgtctattacggtttctaatcatacagtacaaaaataaaatcacaattaatataattacaaagttaactacatgaccaaacatgaacgaagtcaatttagcggccaattcgccttcagccatggaagtgatgtcgctcagactggtgccgacgccgccaaacttggtgttctccatggtggttatgaggttgcttttttgttgggcaataaacgaccagccgctggcatctttccaactgtcgtgataggtcgtgttgccgatggtcgggatccaaaactcgacgtcgtcgtcaattgctagttccttgtagttgctaaaatctatgcattgcgacgagtccgtgttggccacccaacgcccttctttgtagatgctgttgttgtagcaattactggtgtgtgccggcggattggtgcacggcatcagcaaaaacgtgtcgtccgacaaaaatgttgaagaaacagagttgttcatgagattgccaatcaaacgctcgtccaccttggccacggagactatcaggtcgtgcagcatattgtttagcttgttgatgtgcgcatgcatcagctcaatgttcattttcagcaaatcgttttcgtacatcagctcctcttgaatatgcatcaggtcgcctttggtggcagtgtctccctctgtgtacttggctctaacgttgtggcgccaagtgggcggccgcttcttgactcggtgctcgactttgcgtttaatgcatctgttaaacttgcagttccacgtgtttttagaaagatcatatatatcattgtcaatcaaacagtgttcgcgtgtcaccgactcggggttatttttgtcatctttaatgagcagacacgcagcttttatttggcgcgtggtgaacgtagacttttgtttgagaatcatactcacgccgtctcgatgaagcacagtgtccacggtcacgttgatggggttgccctcagcgtccaaaatgtatacctggcactcgtccgtgtcgtcctggcactcgagcctgctgtacattttcgaagtggaaatgccgcatcgccacgatttgttgcacgtgtggtgcgcaaagtgattgttattctgccgcttcaccaactctttgcctttgacccactggccgcggccctcgttgtcgcgaaaacagtcgtcgctgtcactgccccaacggtcgatcagctcttcgcccacctcgcactgctgcctgatgctccacataagcaaatcctctttgcccacattcagcgttttcatggtttcttcgacgcgtgtgttgggatccagcgagccgccgttgtacgcatacgcctggtagtaccccttgtagccgataatcacgttttcgttgtagtccgtctccacgatggtgatttccacgtccttttgcagcgtttccttgggcggggtaatgtccaagtttttaatcttgtacggacccgtcttcatttgcgcgttgcagtgctccgccgcaaaggcagaatgcgccgccgccgccaaaagcacatataaaacaatagcgcttaccatcttgcttgtgtgttccttattgaagccttggtgtgactgatttactagtagcattgaggcatcttatatacccgaccgttatctggcctacgtgacacaaggcacgttgttagattaataatcttatctttttatcttaattgataagattatttttatctggctgttataaaaacgggatcatgaacacggacgctcagtcgacatcgaacacgcgcaacttcatgtactctcccgacagcagtctggaggtggtcatcattaccaattcggacggcgatcacgatggctatctggaactaaccgccgccgccaaagtcatgtcaccttttcttagcaacggcagttcggccgtgtggaccaacgcggcgccctcgcacaaattgattaaaaacaataaaaattatattcatgtgtttggtttatttaaatatctgtcaaattacaatttaaataataaaaagcgtcctaaagagtattacacccttaaatcgattattagcgacttgcttatgggcgctcaaggcaaagtatttgatccgctttgcgaagtaaaaacgcaactgtgtgcgattcaggagagtctcaacgaggctatttcgattttgaacgttcatagcaacgatgcggccgccaacccgcctgcgccagacattaacaagttgcaagaactgatacaagatttgcagtctgaatacaataaaaaaattacctttaccactgatacaattttggagaatttaaaaaatataaaggatttaatgtgcctgaataaataataataagggttttgtacgatttcaacaatgaacttttgggccacgtttagcatttgtctggtgggttatttggtgtacgcgggacacttgaataacgagctacaagaaataaaatcaatattagtggtcatgtacgaatctatggaaaagcatttttccaatgtggtagacgaaattgattctcttaaaacggacacgtttatgatgttgagcaacttgcaaaataacacgattcgaacgtgggacgcagttgtaaaaaatggcaaaaaaatatccaatctcgacgaaaaaattaacgtgttattaacaaaaaacggggtagttaacaacgtgctaaacgttcaataaacgcttatcactaagttaatatactaaaaatcacatagtcactacaatatttcaaaatatgaagccgacgaataacgttatgttcgacgacgcgtcggtcctttggatcgacacggactacatttatcaaaatttaaaaatgcctttgcaggcgtttcaacaacttttgttcaccattccatctaaacatagaaaaatgatcaacgatgcgggcggatcgtgtcataacacggtcaaatacatggtggacatttacggagcggccgttctggttttgcgaacgccttgctcgttcgccgaccagttgttgagcacatttattgcaaacaattatttgtgctacttttaccgtcgtcgccgatcacgatcacgctcacgatcacgctcgcgatcacgttctcctcattgcagacctcgttcgcgctctcctcattgcagacctcgttcgcgatctcggtcccggtctagatcgcggtcacgttcatcgtctcccaggcgagggcgtcgacaaatattcgacgcgctggaaaagattcgtcatcaaaacgacatgttgatgagcaacgtcaaccaaataaatctcaaccaaactaatcaatttttagaattgtccaacatgatgacgggcgtgcgcaatcaaaacgtgcagctcctcgcggcgttggaaaccgctaaagatgttattttgaccagattaaacacattgcttgccgagattacagactcgttacccgacttgacgtccatgttagataaattagctgaacaattgttggacgccatcaacacggtgcagcaaacctgcgcaacgagttgaacaacaccaactctattttgaccaatttagcgtcaagcgtcacaaacatcaacggtacgctcaacaatttgctagccgctatcgaaaacttagtaggcggcggcggcggtggcaattttaacgaagccgacagacaaaaactggacctcgtgtacactttggttaacgaaatcaaaaatatactcacgggaacgctgacaaaaaaataagcatgtccgacaaaacaccaacaaaaaagggtggcagccatgccatgacgttgcgagagcgcggcgtaacaaaacccccaaaaaagtctgaaaagttgcagcaatacaagaaagccatcgctgccgagcaaacgctgcgcaccacagcagatgtttcttctttgcagaaccccggggagagtgccgtttttcaagagttggaaagattagagaatgcagttgtagtattagaaaatgaacaaaaacgattgtatcccatattagatacgcctcttgataattttattgtcgcattcgtgaatccgacgtatcccatggcctattttgtcaataccgattacaaattaaaactagaatgtgccagaatcagaagcgatttactttacaaaaacaaaaacgaagtcgctatcaacaggcctaagatatcgtcttttaaattgcaattgaacaacgtaattttagacactatagaaactattgaatacgatttacaaaataaagttctcacaattactgcacctgttcaagatcaagaactaagaaaatccattatttattttaatattttaaatagtgacagttgggaagtaccaaagtatatgaaaaaattgtttgatgaaatgcaattggaacctcccgtcattttaccattaggtctttagatttggtaaggctagcacgtcgacatcatgtttgcgtcgttgacctcagagcaaaagctgttattaaaaaaatataaatttaacaattatgtgaaaacgatcgagttgagtcaagcgcagttggctcattggcgttcaaacaaagatattcagccaaaacctttggatcgtgcagaaattttacgtgtcgaaaaggccaccaggggacaaagcaaaaatgagctgtggacgctattgcgtttggatcgcaacacagcgtctgcatcgtccaactcgtccggcaacatgttacaacgaccagcgcttttgtttggaaacgcgcaagaaagtcacgtcaaagaaaccaacggcatcatgttagaccacatgcgcgaaatcatagaaagtaaaattatgagcgcggtcgttgaaacggttttggattgcggcatgttctttagccccttgggtttgcacgccgcttcgcccgatgcgtatttttctctcgccgacggaacgtggatcccagtggaaataaaatgtccgtacaattaccgagacacgaccgtggagcagatgcgtgtcgagttggggaacggcaatcgcaagtatcgcgtgaaacacaccgcgctgttggttaacaagaaaggcacgccccagttcgaaatggtcaaaacggatgcgcattacaagcaaatgcaacggcagatgtatgtgatgaacgcgcctatgggcttttacgtggtcaaattcaaacaaaatttggtggtggtttctgtgccgcgcgacgaaacgttctgcaacaaagaactgtctacggaaaacaacgcgtacgtggcgtttgccgtggaaaactccaactgcgcgcgctaccaatgcgccgacaagcgacggctttcattcaaaacgcacagctgcaatcacaactatagtggtcaagaaatcgatgctatggtcgatcgcggaatatatttagattatggacatttaaaatgtgcgtactgtgattttagctcagacagtcgggaaacgtgcgattctgttttaaaacgcgagcacaccaactgcaaaagttttaacttgaaacataaaaactttgacaatcctacatactttgattatgttaaaagattgcaaagtttgctaaagagtcaccactttagaaacgacgctaaaacacttgcctattttggttactatttaactcatacaggaaccctgaagaccttttgctgcggatcgcaaaactcgtcgcccaccaaacacgatcatttaaacgactgtgtatattatttggaaataaaataaacctttatattatatataattcttttatttatacatttgtttatacaattttatttacgacaaatattgactcgttgttcagaaagtttaataagcttgtcaatttcttcggcttgcaaagggctgccaacgcgttcgttttgaatgcgcgtaatccggtttacggtattgttggcgcgaacaataaactcctcaactggcaaattaacaattttgtttgcgtactcattgtgcactgcggccaggttttgtagaatgttttcgggaaaaatggcaattctattaaatttgacatgtttttgattgtatacatagttttgatattcttccagcgtaggatatttgtttaaactcttgacgcattcaatgtacaatttgtgcagtgacaaaattctgttaaaatccaaacgagaacatttctcaaaagttatttcttgaccgttgaaatgtacactttgcaattgtttcaataaactgtcgtaaaaagtttttccttcttcaagcacaaacgcggggcgcatcgtgttatctacaacgcttatgtacttgtcaaaatcttcaattatatgatagaaatacaaatatctctccgcgtttatggacgtgtcgtttaaaacatgttcgtcaacaactccgttatgatttactttcaaaaatttcaaatcttgcaaagcgtccgcgttggtcaacttgttgataataaatttgtctttgcattcaaacgctctgtttgcaatccactccacagcgtccaaaacggacatgcgtttaaacatgttgatacgttttagacaatacgctcgtttttttaccgcctcaacgttcacgtccgtgtagtcgcaccattgcaggatttgcaacatgtcctcggcaaaatgcgcgaactgccgcagcttttcctttccaaaatgttgattgtcgtgtttaaaaagcaacgttgaaatttccgagacataccacaaagccgtgggcaattttactttgatcagcggctccatagccaggttgctgaacccgatcatgcattccgtgttgttaatgcggtaaatgacatagcgtttaaagtagtcctttacattatcgtcaatgtattctgcgtcgtttatgtgcttgtacagcaaatagtacataaggcccgcgttaaacgcgacctttttagcgtcaaaatacgtgcacgccaacacgtaatcgttgtattcgtcgaattgctcgttgggcactatggcgcccgtaaaagggcgtctgctgcgcggtgacaaacgcgttccatgctgaatcaactgcttcaaactttccaaattataacaatattcaattgaatttttaatctctttattttggctccataaaagaggaaactcgagtcggcttttaaacttggtcaaactgccctgaattgtttcaaacaagttgtaatgtgttaacaatatggccggcacaccgctatcgttggctaaaatacaatcggggaatcgaatattttctacgttgctgtaatcgtacgcttcgtcgtcgtcgttggcaacaacatcgtcggtttcggcgttaacgctcgctaacttgttctgatagtgtaaatttttcattacatcaaaagcgtatgacttgttgcgattgtgcaaataatttatggccgtgctaatggtgctgtcgataattttatcaaaattgagaacatcggcgttatacaacgttttataaaattctgttgacttgaacgtgtttacaaactcatttttatttttaatctggtcaaaattcatactagaattgttagtttgtttgatttcgctgaatagccgctggcggagacgcttcagcttgtccacctcgtttaacacgttggcgtccgtcggcatggaattgataaatttgaaccgaacaaaagacagcagttcatcttttttcgatataaaattttcggttgtaatgatatcgtagttaaattctttggttaaattgacccattcgaccatttcatcgttgcgataaatcttgcagtccgagttgttgacaaacgccgaggcaacggacaaatcaatctgttccgtgttattattgatggcataaaacacaatgcgttcgaaactaaacggtttttcgtttagcaaatttttgcaaacgtttgcctcatttttggaaatttggccgtcggtcaccatgtacaaaagtttcaacttgccgtcgagcaagtttatattcttgtgaatccactttatgaattcgctgggcctggtgtcagtaccctcgccattgcggcgcaaataacgactcttgacgtctccgatttctttttggcggcaataagcactccaatgcaaatacaaaactttgtcgcaactactgatgttttcgatttcattctgaaattgttctaaagtttgtaacgcgttcttgttaaagtaatagtccgagtttgtcgacaaggaatcgtcggtggcgtacacgtagtagttaatcatcttgttgattgatatttaattttggcgacggatttttatatacacgagcggagcggtcacgttctgtaacatgagtgatcgtgtgtgtgttatctctggcagcgcgatagtggtcgcgaaaattacacgcgcgtcgtaacgtgaacgtttatattataaatattcaacgttgcttgtattaagtgagcatttgagctttaccattgcaaaatgtgtgtaatttttccggtagaaatcgacgtgtcccagacgattattcgagattgtcaggtggacaaacaaaccagagagttggtgtacattaacaagattatgaacacgcaattgacaaaacccgttctcatgatgtttaacatttcgggtcctatacgaagcgttacgcgcaagaacaacaatttgcgcgacagaataaaatcaaaagtcgatgaacaatttgatcaactagaacgcgattacagcgatcaaatggatggattccacgatagcatcaagtattttaaagatgaacactattcggtaagttgccaaaatggcagcgtgttgaaaagcaagtttgctaaaattttaaagagtcatgattataccgataaaaagtctattgaagcttacgagaaatactgtttgcccaaattggtcgacgaacgcaacgactactacgtggcggtatgcgtgttgaagccgggatttgagaacggcagcaaccaagtgctatctttcgagtacaacccgattggtaacaaagttattgtgccgtttgctcacgaaattaacgacacgggactttacgagtacgacgtcgtagcttacgtggacagtgtgcagtttgatggcgaacaatttgaagagtttgtgcagagtttaatattgccgtcgtcgttcaaaaattcggaaaaggttttatattacaacgaagcgtcgaaaaacaaaagcatgatctacaaggctttagagtttactacagaatcgagctggggcaaatccgaaaagtataattggaaaattttttgtaacggttttatttatgataaaaaatcaaaagtgttgtatgttaaattgcacaatgtaactagtgcactcaacaaaaatgtaatattaaacacaattaaataaatgttaaaatttattgcctaatattattttgtcattgcttgtcatttattaatttggatgatgtcatttgtttttaaaattgaactggctttacgagtagaattctacgcgtaaaacacaatcaagtatgagtcataatctgatgtcatgttttgtacacggctcataaccgaactggctttacgagtagaattctacttgtaatgcacgatcagtggatgatgtcatttgtttttcaaatcgagatgatgtcatgttttgcacacggctcataaactcgctttacgagtagaattctacgtgtaacgcacgatcgattgatgagtcatttgttttgcaatatgatatcatacaatatgactcatttgtttttcaaaaccgaacttgatttacgggtagaattctacttgtaaagcacaatcaaaaagatgatgtcatttgtttttcaaaactgaactcgctttacgagtagaattctacgtgtaaaacacaatcaagaaatgatgtcatttgttataaaaataaaagctgatgtcatgttttgcacatggctcataactaaactcgctttacgggtagaattctacgcgtaaaacatgattgataattaaataattcatttgcaagctatacgttaaatcaaacggacgttatggaattgtataatattaaatatgcaattgatccaacaaataaaattgtaatagagcaagtcgacaatgtggacgcgtttgtgcatattttagaaccgggtcaagaagtgttcgacgaaacgctaagccagtaccaccaatttcctggcgtcgttagttcgattattttcccgcaactcgtgttaaacacaataattagcgttttgagcgaagacggcagtttgctcacgttgaaactcgaaaacacttgttttaattttcacgtgtgcaataaacgctttgtgtttggcaatttgccagcggcggtcgtgaataatgaaacgaagcaaaaactgcgcattggagctccaatttttgccggcaaaaagctggtttcggtcgtgacggcgtttcatcgtgttggcgaaaacgaatggctgttaccggtgacgggaattcgagaggcgtcccagctgtcgggacatatgaaggtgctgaacggcgtccgtgttgaaaaatggcgacccaacatgtccgtctacgggactgtgcaattgccgtacgataaaattaaacagcatgcgctcgagcaagaaaataaaacgccaaacgcgttggagtcttgtgtgctattttacaaagattcagaaatacgcatcacttacaacaagggggactatgaaattatgcatttgaggatgccgggacctttaattcaacccaacacaatatattatagttaaataagaattattatcaaatcatttgtatattaattaaaatactatactgtaaattacattttatttacaatcatgtcaaagcctaacgttttgacgcaaattttagacgccgttacggaaactaacacaaaggttgacagtgttcaaactcagttaaacgggctggaagaatcattccagcttttggacggtttgcccgctcaattgaccgatcttaacactaagatctcagaaattcaatccatattgaccggcgacattgttccggatcttccagactcactaaagcctaagctgaaaacccaagcttttgaactcgattcagacgctcgtcgtggtaaacgcagttccaagtaaatgaatcgtttttaaaataacaaatcaattgttttataatattcgtacgattctttgattatgtaataaaatgtgatcattaggaagattacgaaaaatataaaaaatatgagttctgtgtgtataacaaatgctgtaaacgccacaattgtgtttgttgcaaataaacccagtattatttgattaaaattgttgttttctttgttcatagacaatagtgtgttttgcctaaacgtgtactgcataaactccatgcgagtgtatagcgagctagtggctaacgcttgccccaccaaagtagattcgtcaaaatcctcaatttcatcaccctcctccaagtttaacatttggccgtcggaattaacttctaaagatgccacataatctaataaatgaaatagagattcaaacgtggcgtcatcgtccgtttcgaccatttccgaaaagaactcgggcataaactctatgatttctctggacgtggtgttgtcgaaactctcaaagtacgcagtcaggaacgtgcgcgacatgtcgtcgggaaactcgcgcggaaacatgttgttgtaaccgaacgggtcccatagcgccaaaaccaaatctgccagcgtcaatagaatgagcacgatgccgacaatggagctggcttggatagcgattcgagttaacgctttggcagtcacggtcagcgttttgatggcgatcacgttgagcgagtgcactaacgcggctttgtaagtctctcccaacatgcgcacggtcacgcgccgagtcgtgctaagcaacatgtgtttcatggccggaatgagagaagtgttaatttttttcaacatgcttttaaacccggacattagcatatcaaagccaatgtccgtagcaataccgaaaacgagcgcgtaatcttccaaaaacgatgttataattgactccaagtcttggtcgctgattgaacggtcgagcgcctcgaaatgttcgacacgtgcacgttcgttaccgcggtaattgtatgcgatcggagttttagtaaagccggtttcggccgtgtacgtgatctggacgggcgacccgttgacgatcatgcccaaatcgtttagtgttggatttttgttaaaaagtttttcaaattccaagtctgtggcgttatcgcgcacgctgcgccattgcgctagtattgcgttggagtccacgttgggtcgtggcggtagtatgctggaaggcgctttgtaatcaaaatcgcgcagttcgctaaaaatgttgttggccagcattttgaaagtgacaaagatcgtgtcgcccagcacgaatccgatgagcgattcccaccatctaaacgaacaaccgccgttgaatagctctctgccgaaacgtcgacagtaggcttcgttgaattcgcctttaaagcgttcgggaaacaaggggtcgggatcgggccgaacgttaaaagccggcacatcgtccacgcccatgatcgtgtgttcttcggtgcgcaagtatgggctgttaaagtacattttggacagcgagtccactaagatgcatttgttgtcgagcgtgtatctaaactcggcagactgaacttgggtttcggcgccttcacgcatggccgccgccctgtccaggtggtagcacgcgggctgcgcgtaacccacgctagtctcggaggtctgcatgtacatgaacggcgtcgtgttggacacgacgccggtttcgtgaaacggatagcagctcatgcttacacacccgcgcttgctgaaagccagtttgacggccagcgctttgtcggccaatttcggcggcacataataatcgtcgtcacttgacgcgggacgcagcgtgtagtcgattagtatatgcggaaacctggtgcgccatctcgaaataaactcgagacgatgcatatgtatggcatacctactggcattagttaaatcgacggctgttaaaaccgccatgttatataggacttaaaataaacaacaatatataatgaaatatttattagattatattatagcaatacatttacatttattataacaatactttttatttaatctgattatattataacgatacatttttatttagacattgttatttacaatattaattaactttttatacatttttaaatcataatatataatcatttcgttgtgcatttcaaagcttttgatagcttcaaagtaatacatgaatttagagtattcaggaaaatgataaacgttggtaaacccgcatttggtacaatataacacgggatttttataatacagtttagtttttttacacaatttgcaatagttgttagttgtaggtttcaaaggaaacgtgattgcgccgtccaatacctgggtaaactttttgactttaacagtggcaaacacggttcctttgatacccgaaaatcggttgtcttgcagagcggccatcatttcgcttggctcttgaagtataaaacagttgacgtcatccaccacgtcgggtctggtgcacatgcttcggtagcgctgcaacactatattggtgtatgtttccctgagaacgagaccgccggtggtgctaagatcgattgtttgaatgcgctcgttgggctctttgtgatttcgaattatgcgccgaattatttcaaacactttgcagttgtgatcgtcaattctcaattctttaacttccgtcgtgtgctctaaacttacagggaaaatgtattggtaaaaaaacctctctctggctaaatagctgaggtcgaccaaattgatagaaggatatatttcgtacgaggtttttggaacgttgtgatatagatagcatttttgacagcagatgtctatgcggtcaggatcgtccaacggcttttcgatgtgaaccacaacatacaaaaaccattcgcgcgtgttgtctttgaatctataattgcaagtggtgcatcgcgaatcgctcatgtgctccatagtcttcttgtatttcacaggcctgcttgcaaatttgcccgtcatgcgcatatctttgctgtttatgtagcccataatgtaattggtggaaaattttagcgtggctttcatgatgtcgcgttctaaatcgctcatgaaatgcatacgtagatcgcgctcttgtttgaaatccagtttgtcgctgtacgcgggcaaaccttcaaacttgttcccaaactcgggcggcacaaaatatccatcttttctgttgacgactggttttttacttacaatgctgctgtgctccaacggcttggccggagaggtgcacataggctgtttaggcggagagatgcgcgtaggtggtttgatgttagattttggcggcggacgaacaggcgacggcggcgagttggcggcaggcgctggcaaagatttggcacgacccttgcccccggtccttggcgcgtcaaaaatgttattctctcgaaaaaaacggttcattgtaactgttagttagcactcagaaatcaacacgatactgtgcacgttcagccatcgagaggctttatatatggaaaccttatctatagagataagattgtatatgcgtaggagagcctggtcacgtaggcactttgcgcacggcactagggctgtggaggggacaggctatataaagcccgtttgcccaactcgtaaatcagtatcaattgtgctccggcgcacacgctcgcttgcgcgccggatagtataagtaattgataacgggcaacgcaacatgataagaaccagcagtcacgtgctgaacgtccaggaaaatataatgacgtcaaactgtgcgtcatcgccatattcgtgcgaggcaacgtccgcttgcgcagaagctcagcaggtaatgatcgataactttgttttctttcacatgtacaacgccgacatacaaattgacgcaaagctgcaatgcggcgtgcgctcggccgcgtttgcaatgatcgacgataaacatttggaaatgtacaagcatagaatagagaataaatttttttattactatgatcaatgtgccgacattgccaaacccgaccgtctgcccgatgacgacggcgcgtgctgtcaccattttatttttgatgcccaacgtattattcaatgtattaaagagattgaaagcgcgtacggcgtgcgtgatcgcggcaatgtaatagtgttttatccgtacttgaaacagttgcgagacgcgttgaagctaattaaaaactcttttgcgtgttgttttaaaattataaattctatgcaaatgtacgtgaacgagttaatatcaaattgcctgttgtttattgaaaagctggaaactattaataaaactgttaaagttatgaatttgtttgtagacaatttggttttgtacgaatgcaatgtttgtaaagaaatatctacggatgaaagatttttaaagccaaaagaatgttgcgaatacgctatatgcaacgcgtgctgcgttaacatgtggaagacggccaccacgcacgcaaaatgtccagcgtgcaggacatcgtataaataagcacgcaacgcaaaatgagtggtggcggcaacttgttgactctggaaagagatcattttaaatatttatttttgaccagctattttgatttaaaagataatgaacatgttccttcagagcctatggcatttattcgcaattacttgaattgcacgtttgatttgctagacgatgccgtgctcatgaactatttcaattacttgcaaagcatgcaattgaaacatttggtgggcagcacgtcgacaaacattttcaagtttgtaaagccacaatttagatttgtgtgcgatcgcacaactgtggacattttagaatttgacacgcgcatgtacataaaacccggcacgcccgtgtacgccacgaacctgttcacgtccaatccccgcaagatgatggctttcctgtacgctgaatttggcaaggtgtttaaaaataaaatattcgtaaacatcaacaactacggctgcgtgttggcgggcagtgccggtttcttgttcgacgatgcgtacgtggattggaatggtgtgcgaatgtgtgcggcgccgcgattagataacaacatgcatccgttccgactgtatctactgggcgaggacatggctaagcactttgtcgataataatatactaccgccgcacccttctaacgcaaagactcgcaaaatcaacaattcaatgtttatgctgaaaaacttttacaaaggtctgccgctgttcaaatcaaagtacacggtggtgaacagcactaaaatcgtgacccgaaaacccaacgatatatttaatgagatagataaagaattaaatggcaactgtccgtttatcaagtttattcagcgcgactacatattcgacgcccagtttccgccagatttgcttgatttgctaaacgaatacatgaccaaaagctcgatcatgaaaataattaccaagtttgtgattgaagaaaaccccgctatgagcggtgaaatgtctcgcgagattattcttgatcgctactcagtagacaattatcgcaagctgtacataaaaatggaaataaccaaccagtttcctgtcatgtacgatcatgaatcgtcgtacatttttgtgagcaaagactttttgcaattgaaaggcactatgaacgcgttctacgcgcccaagcagcgtatattaagtattttggcggtgaatcgtttgtttggcgccacggaaacgatcgactttcatcccaacctgctcgtgtaccggcagagttcgccgccggtccgtttgacgggcgacgtgtatgttgttgataagaacgaaaaagtttttttggtcaaacacgtgttctcaaacacggtgcctgcatatcttttaataagaggtgattacgaaagttcgtctgacttgaaatcccttcgcgatttgaatccgtgggttcagaacacgcttctcaaattattaatccccgactcggtacaataatatgatttacactgatcccactactggcgctacgactagcacagacgtcgtccgtccacaaactatttaaacaggctaactccaaacatgttcttgaccatcttggctgtagtagtaattattgctttaataattatatttgttcaatctagcagtaatggaaacagctcggggggtaatgtacctccaaacgccctggggggttttgtaaatcctttaaacgctaccatgcgagctaatccctttatgaacacgcctcaaaggcaaatgttgtagataagtgtataaaaaatgaaacgtatcaaatgcaacaaagttcgaacggtcaccgagattgtaaacagcgatgaaaaaatccaaaagacctacgaattggctgaatttgatttaaaaaatctaagcagtttagaaagctatgaaactctaaaaattaaattggcgctcagcaaatacatggctatgctcagcaccctggaaatgactcaaccgctgttggaaatatttagaaacaaagcagacactcggcagattgccgccgtggtgtttagcacattagcttttatacacaatagattccatccccttgttactaattttactaacaaaatggagtttgtggtcactgaaaccaacgacacaagcattcccggagaacccattttgtttacggaaaacgaaggtgtgctgctgtgttccgtggacagaccgtctatcgttaaaatgctaagccgcgagtttgacaccgaggctttagtaaactttgaaaacgacaactgcaacgtgcggatagccaagacgtttggcgcctctaagcgcaaaaacacgacgcgcagcgatgattacgagtcaaataaacaacccaattacgatatggatttgagcgattttagcataactgaggttgaagccactcaatatttaactctgttgctgaccgtcgaacatgcctatttacattattatatttttaaaaattacggggtgtttgaatattgcaaatcgctaacggaccattcgctttttaccaacaaattgcgatcgacaatgagcacaaaaacgtctaatttactgttaagcaaattcaaatttaccattgaagattttgacaaaataaactcaaattctgtaacatcagggtttaatatatataattttaataaataattaaataatatacaatgtttttattaattatatttttaatattaattaaaagtattaatatttaaaaaaatgaatcaaattcatctaaagtgtcacagcgataaaatttgtcctaaagggtattttggcctcaacgccgatccctatgattgcacggcgtattatctgtgtccgcataaagtgcaaatgttttgcgaattaaatcacgaatttgacttggactccgccagctgcaagcctatcgtgtacgatcacacgggcagcgggtgtacggctcgcatgtatagaaacttgttactatgaagagcgggtttccagttgcacaacactattatcgatttgcagttcgggacataaatgtttaaatatatcgatgtctttgtgatgcgcgcgacatttttgtaggttattgataaaatgaacggatacgttgcccgacattatcattaaatccttggcgtagaatttgtcgggtccattgtccgtgtgcgctagcatgcccgtaacggacctcgtacttttggcttcaaaggttttgcgcacagacaaaatgtgccacacttgcagctctgcatgtgtgcgcgttaccacaaatcccaacggcgcagtgtacttgttgtatgcaaataaatctcgataaaggcgcggcgcgcgaatgcagctgatcacgtacgctcctcgtgttccgttcaaggacggtgttatcgacctcagattaatgtttatcggccgactgttttcgtatccgctcaccaaacgcgtttttgcattaacattgtatgtcggcggatgttctatatctaatttgaataaataaacgataaccgcgttggttttagagggcataataaaagaaatattgttatcgtgttcgccattagggcagtataaattgacgttcatgttggatattgtttcagttgcaagttgacactggcggcgacaagatcgtgaacaaccaagtgactatgacgcaaattaattttaacgcgtcgtacaccagcgcttcgacgccgtcccgagcgtcgttcgacaacagctattcagagttttgtgataaacaacccaacgactatttaagttattataaccatcccaccccggatggagccgacacggtgatatctgacagcgagactgcggcagcttcaaactttttggcaagcgtcaactcgttaactgataatgatttagtggaatgtttgctcaagaccactgataatctcgaagaagcagttagttctgcttattattcggaatcccttgagcagcctgttgtggagcaaccatcgcccagttctgcttatcatgcggaatcttttgagcattctgctggtgtgaaccaaccatcggcaactggaactaaacggaagctggacgaatacttggacaattcacaaggtgtggtgggccagtttaacaaaattaaattgaggcctaaatacaagaaaagcacaattcaaagctgtgcaacccttgaacagacaattaatcacaacacgaacatttgcacggtcgcttcaactcaagaaattacgcattattttactaatgattttgcgccgtatttaatgcgtttcgacgacaacgactacaattccaacaggttctccgaccatatgtccgaaactggttattacatgtttgtggttaaaaaaagtgaagtgaagccgtttgaaattatatttgccaagtacgtgagcaatgtggtttacgaatatacaaacaattattacatggtagataatcgcgtgtttgtggtaacttttgataaaattaggtttatgatttcgtacaatttggttaaagaaaccggcatagaaattcctcattctcaagatgtgtgcaacgacgagacggctgcacaaaattgtaaaaaatgccatttcgtcgatgtgcaccacacgtttaaagctgctctgacttcatattttaatttagatatgtattacgcgcaaaccacatttgtgactttgttacaatcgttgggcgaaagaaaatgtgggtttcttttgagcaagttgtacgaaatgtatcaagataaaaatttatttactttgcctattatgcttagtcgtaaagagagtaatgaaattgagactgcatctaataatttctttgtatcgccgtatgtgagtcaaatattaaagtattcggaaagtgtgcagtttcccgacaatcccccaaacaaatatgtggtggacaatttaaatttaattgttaacaaaaaaagtacgctcacgtacaaatacagcagcgtcgctaatcttttgtttaataattataaatatcatgacaatattgcgagtaataataacgcagaaaatttaaaaaaggttaagaaggaggacggcagcatgcacattgtcgaacagtatttgactcagaatgtagataatgtaaagggtcacaattttatagtattgtctttcaaaaacgaggagcgattgactatagctaagaaaaacaaagagttttattggatttctggcgaaattaaagatgtagacgttagtcaagtaattcaaaaatataatagatttaagcatcacatgtttgtaatcggtaaagtgaaccgaagagagagcactacattgcacaataatttgttaaaattgttagctttaatattacagggtctggttccgttgtccgacgctataacgtttgcggaacaaaaactaaattgtaaatataaaaaattcgaatttaattaattatacatatattttgaatttaattaattatacatatattttatattatttttgtcttttattatcgaggggccgttgttggtgtggggttttgcatagaaataacaatgggagttggcgacgttgctgcgccaacaccacctcctcctcctcctttcatcatgtatctgtagataaaataaaatattaaacctaaaaacaagaccgcgcctatcaacaaaatgataggcattaacttgccgctgacgctgtcactaacgttggacgatttgccgactaaaccttcatcgcccagtaaccaatctagacccaagtcgccaactaaatcaccaaacgagtaaggttcgatgcacatgagtgtttggcccgcaggaagatcgctaatatctacgtattgaggcgaatctgggtcggcggacggatcgctgccgcgacaaactgttttttctacttcatagttgaatccttggcacatgttggttagttcgggcggattgttaggcaacaaggggtcgaatgggcaaatggtaacatccgactgatttagattggggtcttgacgacaagtgcgctgcaataacaagcaggcctcggcgatttctccggcgtctttaccttgcacataataacttccgccggtgttattgatggcgttgattatatcttgtactagtgtggcggcgctaaacaagaaatagccgccggtggccaagagtatgcccgttcctcctacttttaagctttgcatgtaactatgtagacgggggttttgctgcagtgcgttttgaacaccttcgggcgtgcgcacgttggtttccgggaagttttgtttgactgcattggatcgcgtctgcttggtgtggtaattaaagtctggcacgttgtccacgcgccgcaattggctcaatgagtttatttgagggtctgaaatgccctgaaatactccgcgtatgttggggacatcattgttacgagtaattctgtttatgtctgaagtgctcacaaactggttgttagatagttgatagcccggctgaaatctgttgtttccaatgttgcgtacactgggcgcgttgagcacatttgtgaaaccggcgggagtgcttgttaaaagacgcgtattatcagtaataaaactggcctgattaggatacaatttattgactgcgcgaagatttgaaaaaaaactcattttaaagcaaacttatttaataaatatatcacagtaaaggttttgcaaaactgccgtcgtcaatacaacacggcagcggcgtcatgttggtaaaatctaatcttctccttgctttagattctgggcgagaaggcgcatttgttgtgtaagttatttcgacgtctgcattatttgttgtgtaaggtatctcgacgtatgaagcaactttaacattgttataattttttttaaatattgatgcgctccacggcgcgcgttgatacggatgatatctctccattgtatgatcgctaaatttatataccgtttcaataaatatgttaaaacccaacatgttaattataatattcataatagtttgtttgttttcaataattatttttactgttttgaaatctaaaagaggtgacgatgacgaatcagacgacgggttcagttgctataacaaaccaattggagtaaattttccgcatcctactagatgtgacgctttctacatgtgtgtcggtttaaatcaaaaattagagttaatctgccctgaaggatttgaatttgatccagatgttaaaaattgtgttcctatatcagattatggatgtaccgctaaccaaaactaaaaataaaataaaatttatatagattaatgaaataaaatttatatagattaataaaataaaatttatttaatatattatactatttatattatttacaacacttaacgtctagacataacagtttgtaacttagaaactaaatcagagttactgcgctcaaactctgaaaatttggcttgagactcggccacctgcttacgcaattgttcttgcagattattcacagtcgattgcaactcttctgatttcttggtagattcttgcaagtcatagtttgccttttgtaaatctaattcggcgacagcatgcttgtgtttaagcataatgtagtcgctgtttaacatggtcattttatgttcaacttggctggtcttggctcgcagctcggacagttctttttgcaattgctccacatagttcaagtccgtggtgtgattgttgaccgtgttattttctaaaagctcgcgccaatgctgtttgatggaatcctggttacgagtgacgttaatgggcataaattctacatacccgtgcttattgtacacgcgacaatctgatgaagtagcgctgcaaaaacatttgtacacagaattgtccataattatcttgacataacacttgaaacacacagcatggttacaatgaatcgaagtcacaaacgaggaatttacgtttttagtgtctttaaaagtagtaaaacaaatattacacgaaacctctacttcttcttcgggttctgattgctgctgctgctgctgctgcggctgcggagactgcggcgaggcaaacaaatctggcgactgtggtattacgtaattcggcgaataagatggactataagtgggagaccttggggcaatctcattcatcagctgagcctcaagatctaaacctcgttgcagagccctctgcgcagctgtctccgacgcaatgttatcctggtactgctgggcagtgatgtcgggaaaccgttcacgatccacattttcactattaattagtatgacgtcatcctcttgacttaatagcggatcgtcattgctaatgttaacctgaccgtgcacgtaatacgtgacaccctgacgatggtaggtgcgcgtcaacggctcgttgacgttcccgataatctgcacgttttcttcgctgacacgctgctcctgacgccgctcctgacggcgatggctgcgactgcttgaagacggctggctgcgactgcttgaagacggctgggcttcgggagatgttgtaaagttgatgcggcgacggctgagagacagcctgtggcggcggctgctgctgggagtggcggcgttgatttggcgactcatggctgggctggtaggatactgttcactaggctgtgaggcttgaactgtgcttacgagtagaacggcagctgtatttatactgtttatcagtactgcacgactgataagacaatagtggtgggggaacttgccaggcaaaaatgaacttttttgtaatgcaaaaaagttgatagtgtagtagtatattgggagcgtatcgtacagtgtagactattctaataaaatagtctacgatttgtagagattgtactgtatatggagtgtcaggcaaaagtgaacttttttgcattgcaaaaaaattcattttaaatttatcatatcacaggctgcagtttctgttatctgtcccccactcaggcgtgcagctataaaagcaggcactcaccaactcgtaagcacagttcgttgtgaagtgaacacggagagcctgccaataagcaaaatgccaagggacaccaacaatcgccaccggtctacgccatatgaacgtcctacgcttgaagatctccgcagacagttgcaagacaatttggacagcataaaccgccgagacagaatgcaagaagaacaagaagaaaacctgcgctatcaagtgcgtagaaggcagcgtcaaaaccagctccgctccatacaaatggaacagcagcgaatgatggcggaattaaacaacgagccggtgattaattttaaatttgagtgtagtgtgtgtttagaaacatattcccaacaatctaacgatacttgtccttttttgattccgactacgtgcgaccacggtttttgtttcaaatgcgtcatcaatctgcaaagcaacgcgatgaatattccgcattccactgtgtgctgtccattgtgcaatacccaggtaaaaatgtggcgttccttaaagcctaacgctgttgtgacgtgtaagttttacaagaaaactcaagaaagagttccgcccgtgcagcagtataaaaacattattaaagtgctacaagaacggagcgtgattagtgtcgaagacaacgacaataattgtgacataaatatggagaatcaggcaaagatagctgctttggaagctgaattggaagaagaaaaaaatcacagtgatcaagtagcttctgaaaaccgacagctgatagaagaaaatactcgtctcaatgaacagattcaagagttgcagcatcaggtgaggacattggtgccgcaacgtggcattacggttaatcagcaaattggccgtgacgacagtgcgccagccgagctgaacgagcgttttcgctcacttgtctattcgactatttcagagctgtttattgaaaatggcgttcatagtattcaaaattatgtttatgccggaacttctgctgctagttcatgtgatgtaaatgttactgttaattttgggtttgaaaattaatgtgatatgaaatgtatatataaaaatgatggaataaataataaacatttttatactttttatgttttttttatttcatgtgattaagaaacttttaagatggatagtagtaattgtattaaaatagatgtaaaatacgatatgccgttacattatcaatgtgacaataacgcagataaagacgttgtaaatgcgtatgacactatcgatgttgaccccaacaaaagatttataattaatcataatcacgaacaacaacaagtcaatgaaacaaataaacaagttgtcgataaaacattcataaatgacacagcaacatacaattcttgcataataaaaatttaaatgacatcatatttgagaataacaaatgacattatccctcgattgtgttttacaagta

We claim:

1. A method for producing a recombinant adeno-associated virus (rAAV) comprising a polynucleotide encoding a payload, comprising:
(a) culturing viral production cells (VPCs) in a bioreactor to a target cell density;
(b) introducing into the bioreactor at least one baculovirus (expressionBac) comprising a viral expression construct, and at least one baculovirus (payloadBac) comprising the polynucleotide encoding the payload, and wherein the viral expression construct comprises an adeno-associated virus (AAV) viral expression construct encoding a viral capsid and at least one viral replication protein;
(c) incubating the VPCs in the bioreactor under conditions that result in the production of one or more rAAVs within one or more VPCs, wherein one or more of the rAAVs comprise the polynucleotide encoding a payload;
(d) harvesting a viral production pool from the bioreactor, wherein the viral production pool comprises one or more VPCs comprising one or more rAAVs;
(e) lysing the one or more VPCs in the viral production pool, thereby releasing one or more rAAVs from the one or more VPCs into a lysis medium;
(f) processing the lysis medium, wherein the processing comprises (optionally in the following order):
(i) one or more clarifying steps;
(ii) one or more immunoaffinity chromatography steps;
(iii) one or more anion exchange chromatography steps;
(iv) one or more tangential flow filtration (TFF) steps, wherein the one or more TFF steps comprises ultrafiltration followed by diafiltration; and
(v) one or more virus retentive filtration (VRF) steps;
wherein the processing optionally further comprises one or more filtration steps before or after any one or more of steps (i)-(v);
wherein the method yields a purified drug substance pool comprising a purified drug substance.

2. A method for producing a recombinant adeno-associated virus (rAAV) comprising a polynucleotide comprising a payload, comprising:
(a) culturing viral production cells (VPCs) in a bioreactor to a target cell density;
(b) introducing into the bioreactor at least one baculovirus (expressionBac) comprising a viral expression construct, and at least one baculovirus (payloadBac) comprising the polynucleotide encoding the payload, and wherein the viral expression construct comprises an adeno-associated virus (AAV) viral expression construct encoding a viral capsid and at least one viral replication protein;
(c) incubating the VPCs in the bioreactor under conditions that result in the production of one or more rAAVs within one or more VPCs, wherein one or more of the rAAVs comprise the polynucleotide encoding a payload;
(d) harvesting a viral production pool from the bioreactor, wherein the viral production pool comprises one or more VPCs comprising one or more rAAVs;
(e) lysing the one or more VPCs in the viral production pool by chemical lysis, thereby releasing one or more rAAVs from the one or more VPCs into a lysis medium;
(f) clarifying the lysis medium of (e) through one or more clarifying steps, yielding a clarification pool, wherein the clarification pool is optionally filtered;
(g) processing the clarification pool of(f) through one or more immunoaffinity chromatography steps, yielding an immunoaffinity chromatography pool, wherein the one or more immunoaffinity chromatography steps optionally comprises neutralizing the immunoaffinity chromatography pool, and wherein the immunoaffinity chromatography pool is optionally filtered;
(h) processing the immunoaffinity chromatography pool of (g) through one or more anion exchange chromatography steps, yielding an anion exchange chromatography pool, wherein the anion exchange chromatography pool is optionally filtered;
(i) processing the anion exchange chromatography pool of (h) through one or more tangential flow filtration (TFF) steps, wherein the one or more TFF steps comprises ultrafiltration followed by diafiltration, wherein the one or more TFF steps yields a concentrated, buffer-exchanged pool, wherein the concentrated, buffer-exchanged pool is optionally filtered;
(j) processing the concentrated, buffer-exchanged pool of (i) through one or more virus retentive filtration (VRF) steps, yielding a viral filtration pool comprising rAAVs comprising a payload, wherein the viral filtration pool is optionally filtered;
wherein the method yields a purified drug substance pool comprising a purified drug substance.

3. The method of claim 2, wherein, following (j), the viral filtration pool is processed through a further filtration step.

4. The method of any one of claims 1-3, wherein the viral capsid comprises an amino acid sequence or is encoded by a nucleotide sequence of any one of SEQ ID NOs: 1-875, 992-1374, and 1775-1777, or a functional variant thereof.

5. The method of any one of claims 1-3, wherein the viral capsid is AAV2.

6. The method of any one of claims 1-5, wherein the viral capsid is encoded by SEQ ID NO: 1778.

7. The method of any one of claims 1-6, wherein the viral capsid comprises SEQ ID NO: 16.

8. The method of any one of claims 1-7, wherein the payload comprises a polynucleotide encoding aromatic L-amino acid decarboxylase (AADC) or a functional variant thereof.

9. The method of any one of claims 1-7, wherein the payload comprises a polynucleotide encoding a therapeutic protein, an enzyme, an antibody or antigen-binding fragment thereof, a protein ligand, or a soluble receptor.

10. The method of any one of claims 1-7, wherein the payload comprises a polynucleotide encoding a modulatory polynucleotide which interferes with a target gene expression and/or a target protein production; optionally wherein the modulatory polynucleotide is an antisense strand, a miRNA molecule, or a siRNA molecule.

11. The method of any one of claims 1-10, wherein the VPCs are insect cells.

12. The method of claim 11, wherein the insect cells are Sf9 cells.

13. The method of claim 8, wherein the polynucleotide encoding AADC or a functional variant thereof encodes SEQ ID NO: 978.

14. The method of claim 13, wherein the polynucleotide further comprises a 5′ inverted terminal repeat (ITR); at least one multiple cloning site (MCS) region; a CMV enhancer; a cytomegalovirus (CMV) promoter; an intron region comprising immediate-early 1 (Ie1) exon 1, Ie1 intron 1 (partial), human beta-globin (hBglobin) intron 2, and hBglobin intron 3; a polyadenylation (poly(A)) signal, and a 3′ ITR.

15. The method of claim 14, wherein the polynucleotide comprises, e.g., from 5′ to 3′:
(a) a 5′ ITR comprising SEQ ID NO: 980;
(b) a first MCS region comprising SEQ ID NO: 981;
(c) a CMV enhancer comprising SEQ ID NO: 982;
(d) a CMV promoter comprising SEQ ID NO: 983;
(e) an intron region comprising an Ie1 exon 1 (SEQ ID NO: 984), a partial Ie1 intron 1 (SEQ ID NO: 985), a human beta-globin (hBglobin) intron 2 (SEQ ID NO: 986), and a hBglobin intron 3 (SEQ ID NO: 987);
(f) a polynucleotide encoding an AADC amino acid sequence comprising SEQ ID NO: 978, wherein optionally the polynucleotide comprises SEQ ID NO: 988;
(g) a second MCS region comprising SEQ ID NO: 989;
(h) a poly(A) signal comprising SEQ ID NO: 990; and
(i) a 3′ ITR comprising SEQ ID NO: 991.

16. The method of claim 15, wherein the polynucleotide comprises a sequence at least 90%, at least 95%, at least 97%, at least 98%, or at least 99% identical to SEQ ID NO: 979.

17. The method of claim 16, wherein the polynucleotide comprises SEQ ID NO: 979.

18. The method of any one of claims 1-17, wherein the viral expression construct comprises a nucleic acid sequence of SEQ ID NO: 1778.

19. The method of any one of claims 1-18, wherein the viral expression construct encodes SEQ ID NO: 16.

20. The method of any one of claims 1-19, wherein the at least one expressionBac is comprised in at least one baculovirus infected insect cell (expressionBIIC) and/or the at least one payloadBac is comprised in at least one baculovirus infected insect cell (payloadBIIC), wherein optionally the at least one expressionBac is comprised in at least one expressionBIIC and the at least one payloadBac is comprised in at least one payloadBIIC.

21. The method of claim 20, wherein the at least one expressionBIIC is introduced into the bioreactor at a ratio of 1:200,000 to 1:400,000 expressionBIIC:VPC (v/v) and/or the at least one payloadBIIC is introduced into the bioreactor at a ratio of 1:25,000 to 1:200,000 payloadBIIC:VPC (v/v), wherein the ratio of expressionBIIC:payloadBIIC is between about 1:1-1:5.

22. The method of claim 20, wherein the at least one expressionBIIC is introduced into the bioreactor at a ratio of 1:250,000 to 1:350,000 expressionBIIC:VPC (v/v) (e.g., 1:300,000 expressionBIIC:VPC (v/v)) and/or the at least one payloadBIIC is introduced into the bioreactor at a ratio of 1:50,000 to 1:150,000 payloadBIIC:VPC (v/v) (e.g., 1:100,000 payloadBIIC:VPC (v/v)), wherein the ratio of expressionBIIC:payloadBIIC is about 1:3.

23. The method of any one of claims 1-22, wherein the VPCs are cultured in the bioreactor in insect cell culture medium.

24. The method of claim 23, wherein the insect cell culture medium is a serum free, protein-free medium, wherein optionally the insect cell culture medium comprises L-glutamine and poloxamer 188, wherein further optionally the insect cell culture medium comprises EFS AF™ insect cell culture medium.

25. The method of any one of claims 1-24, wherein the VPCs of step (a) are cultured in the bioreactor and/or the VPCs, at least one expressionBac, and at least one payloadBac of step (c) are incubated in the bioreactor at 26° C.-28° C. (e.g., 27° C.) and 30%-50% (e.g., 40%) dissolved oxygen.

26. The method of any one of claims 1-25, wherein the target cell density of the VPCs of step (a) is 3.0×10⁶-3.4×10⁶ cells/mL (e.g., 3.2×10⁶-3.4×10⁶ cells/mL; e.g., 3.2×10⁶ cells/mL).

27. The method of any one of claims 1-26, wherein the lysing comprises a chemical lysis solution comprising a surfactant and arginine or a salt thereof, wherein optionally the surfactant is octyl phenol ethoxylate and the arginine or salt thereof is arginine hydrochloride.

28. The method of claim 27, wherein the chemical lysis solution comprises between about 0.1-1.0% (w/v) octyl phenol ethoxylate and between about 150-250 mM arginine hydrochloride.

29. The method of claim 28, wherein the chemical lysis solution comprises 0.5% (w/v) octyl phenol ethoxylate and 200 mM arginine hydrochloride.

30. The method of any one of claims 27-29, wherein the chemical lysis solution is free of detectable nuclease.

31. The method of any one of claims 27-30, wherein the lysing is carried out for 4-6 hours (e.g., 4 hours) at 26° C.-28° C. (e.g., 27° C.).

32. The method of any one of claims 1-31, wherein the one or more clarifying steps comprises depth filtration followed by filtration through an about 0.2 μm filter.

33. The method of any one of claims 1-32, wherein the one or more immunoaffinity chromatography steps comprises an immunoaffinity chromatography column comprising a recombinant protein ligand that binds at least one of AAV1, AAV2, AAV3, AAV5, and AAV9; and optionally binds at least AAV2.

34. The method of claim 33, wherein the immunoaffinity chromatography column is equilibrated with a solution comprising between about 25-75 mM sodium phosphate, between about 325-375 mM sodium chloride, and between about 0.001-0.01% w/v poloxamer 188; flushed with a solution comprising between about 25-75 mM sodium phosphate, between about 325-375 mM sodium chloride and between about 0.001-0.01% w/v poloxamer 188; washed with a solution comprising between about 15-25 mM sodium citrate, between about 0.5-1.5 M sodium chloride and between about 0.001-0.01% w/v poloxamer 188; and washed with a solution of between about 5-15 mM sodium citrate, between about 325-375 mM sodium chloride and between about 0.001-0.01% w/v poloxamer 188; wherein the one or more immunoaffinity chromatography steps yields a immunoaffinity chromatography pool.

35. The method of claim 34, wherein the immunoaffinity chromatography column is equilibrated with a solution comprising 50 mM sodium phosphate, 350 mM sodium chloride and 0.001% w/v poloxamer 188; flushed with a solution comprising 50 mM sodium phosphate, 350 mM sodium chloride and 0.001% w/v poloxamer 188; washed with a solution comprising 20 mM sodium citrate, 1 M sodium chloride and 0.001% w/v poloxamer 188; and washed with a solution of 10 mM sodium citrate, 350 mM sodium chloride and 0.001% w/v poloxamer 188; wherein the one or more immunoaffinity chromatography steps yields a immunoaffinity chromatography pool.

36. The method of claim 34 or claim 35, wherein the immunoaffinity chromatography pool is neutralized with between about 1.5-2.5 M Tris Base and between about 0.001-0.01% w/v poloxamer 188 (2.5-3.5% v/v spike, pH 8.0-8.5).

37. The method of any one of claims 34-36, wherein the immunoaffinity chromatography pool is neutralized with 2 M Tris Base and 0.001% w/v poloxamer 188 (3.0% v/v spike, pH 8.0-8.5).

38. The method of any one of claims 34-37, wherein the immunoaffinity chromatography pool is filtered through an about 0.2 μm filter.

39. The method of any one of claims 1-38, wherein the one or more anion exchange chromatography steps comprises charging and equilibrating an anion exchange chromatography column with a solution comprising between about 15-25 mM Tris, between about 1.5-2.5 M sodium chloride and between about 0.001-0.01% w/v poloxamer 188, then a solution of between about 35-45 mM Tris, between about 150-190 mM sodium chloride and between about 0.001-0.01% w/v poloxamer 188.

40. The method of claim 39, wherein the one or more anion exchange chromatography steps comprises charging and equilibrating the anion exchange chromatography column with a solution comprising 20 mM Tris, 2 M sodium chloride and 0.001% w/v poloxamer 188, then a solution of 40 mM Tris, 170 mM sodium chloride and 0.001% w/v poloxamer 188.

41. The method of claim 39 or claim 40, wherein the anion exchange chromatography column is flushed and eluted with a solution comprising between about 35-45 mM Tris, between about 150-190 mM sodium chloride and between about 0.001-0.01% w/v poloxamer 188, yielding an anion exchange chromatography pool.

42. The method of claim 41, wherein the anion exchange chromatography column is flushed and eluted with a solution comprising 40 mM Tris, 170 mM sodium chloride and 0.001% w/v poloxamer 188, yielding an anion exchange chromatography pool.

43. The method of claim 41 or claim 42, wherein the anion exchange chromatography pool is filtered through an about 0.2 μm filter.

44. The method of any one of claims 1-43, wherein:
the one or more immunoaffinity chromatography steps comprises loading the immunoaffinity chromatography column with a 1.0×10¹³-5.0×10¹³ vg/mL-r load challenge at 18-25° C.; and/or
the one or more anion exchange chromatography steps comprises loading the anion exchange chromatography column with a 1.0×10¹³-5.0×10¹³ vg/mL-r load challenge at 18-25° C.

45. The method of any one of claims 1-44, wherein the one or more TFF steps comprises TFF filtration with a TFF filter, yielding a TFF load pool, followed by concentration of the TFF load pool by ultrafiltration followed by diafiltration, yielding a final TFF load pool.

46. The method of claim 45, wherein the TFF filtration comprises equilibration with a buffer comprising about 35-45 mM Tris, between about 150-190 mM sodium chloride and between about 0.001-0.01% w/v poloxamer 188.

47. The method of claim 46, wherein the TFF filtration comprises equilibration with a buffer comprising 40 mM Tris, 170 mM sodium chloride, and 0.001% (w/v) poloxamer 188.

48. The method of any one of claims 45-47, wherein, after obtaining the TFF load pool, the TFF filter is subjected to a recovery flush using a buffer comprising between about 15-25 mM sodium phosphate, between about 160-200 mM sodium chloride, and between about 0.001-0.01% w/v poloxamer 188, yielding a TFF recovery flush pool.

49. The method of claim 48, wherein, after obtaining the TFF load pool, the TFF filter is subjected to a recovery flush using a buffer comprising 10 mM sodium phosphate, 180 mM sodium chloride, and 0.001% (w/v) poloxamer 188, yielding a TFF recovery flush pool.

50. The method of any one of claims 45-49, wherein the TFF load pool is concentrated by ultrafiltration to a viral concentration of between about 3.0×10¹²-7.0×10¹² vg/mL.

51. The method of claim 50, wherein the TFF load pool is concentrated by ultrafiltration to a viral concentration of about 5.0×10¹² vg/mL.

52. The method of any one of claims 45-51, wherein diafiltration comprises buffer exchange with a buffer comprising between about 5-15 mM sodium phosphate, between about 160-200 mM sodium chloride, and between about 0.001-0.01% w/v poloxamer 188 (buffer pH of 7.1-7.5).

53. The method of claim 52, wherein diafiltration comprises buffer exchange with a buffer comprising 10 mM sodium phosphate, 180 mM sodium chloride, and 0.001% (w/v) poloxamer 188 (buffer pH of 7.1-7.5, e.g., pH 7.3).

54. The method of any one of claims 45-53, wherein the final TFF load pool is filtered through an about 0.2 μm filter, yielding a filtered final TFF load pool.

55. The method of any one of claims 48-54, wherein the TFF recovery flush pool is filtered through an about 0.2 μm filter, yielding a filtered TFF recovery flush pool.

56. The method of claim 55, wherein the filtered final TFF load pool and the filtered TFF recovery flush pool are combined to form a concentrated, buffer-exchanged pool, wherein the concentrated, buffer-exchanged pool is optionally diluted using a buffer comprising between about 5-15 mM sodium phosphate, between about 160-200 mM sodium chloride, and between about 0.001-0.01% w/v poloxamer 188 (buffer pH of 7.1-7.5), wherein the concentrated, buffer-exchanged pool comprises a viral concentration of 1.0×10¹²-7.0×10¹² vg/mL.

57. The method of claim 56, wherein the filtered final TFF load pool and the filtered TFF recovery flush pool are combined to form a concentrated, buffer-exchanged pool, wherein the concentrated, buffer-exchanged pool is optionally diluted using a buffer comprising 10 mM sodium phosphate, 180 mM sodium chloride, and 0.001% (w/v) poloxamer 188 (buffer pH of 7.1-7.5, e.g., pH 7.3), wherein the concentrated, buffer-exchanged pool comprises a viral concentration of 2.0×10¹²-6.0×10¹² vg/mL, e.g., 5.0×10¹² vg/mL.

58. The method of any one of claims 1-57, wherein the one or more VRF steps comprises filtration with a VRF filter having a pore size of about 35 nm, yielding a viral filtration pool.

59. The method of claim 58, wherein the VRF filter is flushed twice before use with a solution comprising between about 5-15 mM sodium phosphate, between about 160-200 mM sodium chloride, and between about 0.001-0.01% w/v poloxamer 188 (buffer pH of 7.1-7.5).

60. The method of claim 59, wherein the VRF filter is flushed twice before use with a solution comprising 10 mM sodium phosphate, 180 mM sodium chloride, and 0.001% poloxamer 188 (solution pH of 7.1-7.5, e.g., pH 7.3).

61. The method of any one of claims 58-60, wherein the viral filtration pool is filtered through a filter of about 0.2 μm.

62. The method of any one of claims 58-61, wherein the viral filtration pool comprises a viral concentration of 10×10¹²-7.0×10¹² vg/mL.

63. The method of claim 62, wherein the viral filtration pool comprises a viral concentration of 3.5×10¹²-5.0×10¹² vg/mL, e.g., about 5.0×10¹² vg/mL.

64. The method of any one of claims 58-63, wherein the viral filtration pool is filtered at least once (optionally at least twice) using an about 0.22 μm filter, yielding a filtered drug substance pool in a solution comprising between about 5-15 mM sodium phosphate, between about 160-200 mM sodium chloride, and between about 0.001-0.01% w/v poloxamer 188 (buffer pH of 7.1-7.5).

65. The method of claim 64, wherein the viral filtration pool is filtered at least once (optionally at least twice) using an about 0.22 μm filter, yielding a filtered drug substance pool in a solution comprising 10 mM sodium phosphate, 180 mM sodium chloride, and 0.001% poloxamer 188 (solution pH of 7.1-7.5, e.g., pH 7.3).

66. The method of claim 64 or claim 65, wherein the filtered drug substance pool comprises a viral concentration of 1.0×10¹²-7.0×10¹² vg/mL.

67. The method of claim 66, wherein the filtered drug substance pool comprises a viral concentration of 3.0×10¹²-5.0×10¹² vg/mL, e.g., about 5.0×10¹² vg/mL.

68. The method of any one of claims 1-67, wherein the purified drug substance comprises greater than about 3.0×10¹² vg/mL (e.g., between about 3.0×10¹² vg/mL to about 7.0×10¹² vg/mL) rAAVs in a solution comprising 5-15 mM sodium phosphate, 160-200 mM sodium chloride, and 0.001-0.01% poloxamer (solution pH of 7.1-7.5).

69. The method of claim 68, wherein the purified drug substance comprises greater than about 5.0×10¹² vg/mL rAAVs in a solution comprising about 10 mM sodium phosphate, about 180 mM sodium chloride, and about 0.001% poloxamer 188 (solution pH of about 7.3).

70. The method of any one of claims 1-69, wherein the purified drug substance comprises less than about 20% empty viral capsids.

71. The method of claim 70, wherein the purified drug substance comprises less than about 10% empty viral capsids.

72. The method of any one of claims 1-71, wherein the purified drug substance has an AADC relative potency of at least 50%.

73. The method of any one of claims 1-72, wherein the VRCs, at least one expressionBac (e.g., at least one expressionBIIC), and at least one payload Bac (e.g., at least one payloadBIIC) are incubated for 156-180 hours, e.g., 164-172 hours, e.g., 168 hours, prior to lysis.

74. The method of any one of claims 1-73, wherein the VRCs incubating with at least one expressionBac (e.g., at least one expressionBIIC) and at least one payloadBac (e.g., at least one payloadBIIC) have at least 85% viability, e.g., at least 90% viability, prior to lysis.

75. The method of any one of claims 1-74, wherein the viral production pool weighs 195-198 kg, e.g., 196 kg, prior to lysis.

76. The method of any one of claims 1-75, wherein the method produces a total process rAAV yield of 30%-50%.

77. The method of any one of claims 1-76, wherein the purified drug substance comprises one or more (e.g., all) of the following: a payload, greater than about 60% full viral capsids (e.g., viral capsids containing the polynucleotide encoding the payload), less than about 5% VPC (e.g., Sf9 cell) protein contaminants, less than 2 ng/mL DNA contaminants from the VPCs, an osmolality of 300-400 mOsm/kg, less than about 6000 particles with a size of ≥10 μm, less than about 600 particles with a size of ≥25 μm, and/or a solution pH of 7.3±0.5.

78. The method of any one of claims 1-77, wherein the rAAVs comprise a capsid from AAV2, e.g., an AAV2 capsid encoded by a nucleic acid sequence comprising SEQ ID NO: 1778, e.g., an AAV2 capsid comprising an amino acid sequence SEQ ID NO: 16.

79. The method of any one of claims 1-78, wherein the viral expression construct comprises one or more polynucleotides encoding a VP1 capsid protein, VP2 capsid protein, VP3 capsid protein, Rep52, and Rep78.

80. The method of any one of claims 1-79, wherein the viral expression construct comprises a nucleic acid sequence of SEQ ID NO: 1778, e.g., encoding an amino acid sequence SEQ ID NO: 16.

81. The method of claim 79 or claim 80, wherein the viral expression construct comprises a nucleic acid sequence of SEQ ID NO: 1779, e.g., encoding an amino acid sequence of SEQ ID NO: 1780.

82. The method of any one of claims 79-81, wherein the VP1 capsid protein, VP2 capsid protein, and VP3 capsid protein are encoded in one or more open reading frames and the Rep52 and Rep78 are encoded in one or more open reading frames, wherein the one or more open reading frames encoding the VP1 capsid protein, VP2 capsid protein, and VP3 capsid protein and the one or more open reading frames encoding the Rep52 and Rep78 are different open reading frames.

83. The method of claim 82, wherein VP1 capsid protein, VP2 capsid protein, and VP3 capsid protein are encoded in a first open reading frame and the Rep52 and Rep78 are encoded in a second open reading frame.

84. The method of any one of claims 1-83, wherein the method further comprises aliquoting the purified drug substance into one or more vials at a volume of about 1.2 mL, wherein the one or more vials have an extractable volume of about 1.0 mL.

85. The method of claim 84, wherein the method further comprises storing the one or more vials at ≤65° C.

86. A composition comprising rAAVs comprising a payload, produced by the method of any one of claims 1-85, wherein the composition comprises greater than about 60% full viral capsids (e.g., less than about 40% empty viral capsids), less than about 5% protein contaminants, less than 2 ng/mL Sf9 residual host DNA contaminants, an osmolality of 300-400 mOsm/kg, less than about 6000 particles with a size of ≥10 μm, less than about 600 particles with a size of ≥25 μm, and/or a solution pH of 7.3±0.5.

87. The composition of claim 86, wherein the payload is AADC or a functional variant thereof.

88. The composition of claim 86 or claim 87, wherein the rAAV comprises an AAV2 capsid.

89. The composition of claim 88, wherein the AAV2 capsid is encoded by SEQ ID NO: 1778.

90. The composition of claim 88 or claim 89, wherein the AAV2 capsid comprises SEQ ID NO: 16.

91. The composition of any one of claims 86-90, wherein the composition comprises 1.0×10¹²-7.0×10¹² vg/mL rAAVs, in a solution comprising between about 5-15 mM sodium phosphate, between about 160-200 mM sodium chloride, and between about 0.001-0.01% poloxamer 188 (solution pH of 7.1-7.5).

92. The composition of claim 91, wherein the composition comprises 3.0×10¹²-5.0×10¹² vg/mL rAAVs, e.g., about 5.0×10¹² vg/mL rAAVs, in a solution comprising 10 mM sodium phosphate, 180 mM sodium chloride, and 0.001% poloxamer 188 (solution pH of 7.1-7.5, e.g., pH 7.3).

93. The composition of any one of claims 86-92, wherein the composition comprises less than about 20% empty viral capsids.

94. The composition of claim 93, wherein the composition comprises less than about 10% empty viral capsids.

95. The composition of any one of claims 86-94, wherein the composition has an AADC relative potency of at least 50%.

96. The composition of any one of claims 86-95, for use in treating and/or preventing Parkinson's Disease.

97. A method of treating Parkinson's Disease comprising administering an effective amount of the composition of any one of claims 86-95.

98. Use of the composition of any one of claims 86-95 in the manufacture of a medicament for treating and/or preventing Parkinson's Disease.

99. A method for producing a recombinant adeno-associated virus 2 (rAAV2) comprising a polynucleotide comprising SEQ ID NO: 979, wherein the method comprises:
(a) culturing Sf9 cells (viral production Sf9 cells) in a bioreactor to a target cell density of 3.0×10⁶-3.4×10⁶ cells/mL; wherein the viral production Sf9 cells are cultured in serum-free, protein-free insect cell culture medium at about 26° C.-28° C. and 30/6-50% dissolved oxygen, wherein the serum-free, protein-free insect cell culture medium optionally comprises L-glutamine and poloxamer 188;
(b) introducing into the bioreactor baculovirus infected insect cells (expressionBIICs) comprising baculoviruses comprising a viral expression construct, and baculovirus infected insect cells (payloadBIICs) comprising baculoviruses comprising the polynucleotide comprising SEQ ID NO: 979, wherein the viral expression construct comprises one or more polynucleotides encoding a viral capsid and at least one viral replication protein of adeno-associated virus 2 (AAV2); wherein the polynucleotide comprises SEQ ID NO: 979; and wherein the expressionBIICs are introduced at a ratio of about 1:300.000 expressionBIIC:viral production Sf9 (v/v) and the payloadBIICs are introduced at a ratio of about 1:100,000 payloadBIIC:viral production Sf9 (v/v), wherein the expressionBIICs and/or payload BIICs are optionally Sf9 cells;
(c) incubating the viral production Sf9 cells in the bioreactor under conditions that result in the production of one or more rAAV2s within one or more of the viral production Sf9 cells, wherein one or more of the rAAV2s comprise a polynucleotide comprising SEQ ID NO: 979;
(d) harvesting a viral production pool from the bioreactor, wherein the viral production pool comprises one or more viral production Sf9 cells comprising one or more rAAV2s, wherein the viral production pool optionally weighs 195-198 kg, e.g., 196 kg, and has a % viability of at least 85%, e.g., at least 90%;
(e) lysing the viral production Sf9 cells in the viral production pool, wherein the lysing comprises a chemical lysis solution and is carried out at 26° C.-28° C. for 4-6 hours, wherein the chemical lysis solution comprises 0.5% (w/v) octyl phenol ethoxylate and 200 mM arginine hydrochloride, and lacks detectable nuclease, thereby releasing one or more rAAV2s from the viral production Sf9 cells into a lysis medium;
(f) clarifying the lysis medium of (e) through a depth filter followed by an about 0.2 μm filter, yielding a clarification pool;
(g) processing the clarification pool of (f) through an immunoaffinity chromatography column comprising a recombinant protein ligand that binds at least AAV2; wherein the immunoaffinity chromatography column is equilibrated with a solution comprising 50 mM sodium phosphate, 350 mM sodium chloride and 0.001% w/v poloxamer 188; loaded with a 1.0×10¹³-5.0×10¹³ vg/mL-r load challenge at 18-25° C.; flushed with a solution comprising 50 mM sodium phosphate, 350 mM sodium chloride and 0.001% w/v poloxamer 188; washed with a solution comprising 20 mM sodium citrate, 1 M sodium chloride and 0.001% w/v poloxamer 188; and washed with a solution of 10 mM sodium citrate, 350 mM sodium chloride and 0.001% w/v poloxamer 188; wherein processing the clarification pool of(f) through an immunoaffinity chromatography column yields an immunoaffinity chromatography pool, wherein the immunoaffinity chromatography pool is optionally neutralized with 2 M Tris Base and 0.001% w/v poloxamer 188 (3.0% v/v spike, pH 8.0-8.5) and optionally filtered through an about 0.2 μm filter;
(h) processing the immunoaffinity chromatography pool or filtered immunoaffinity chromatography pool of (g) through an anion exchange chromatography column, e.g., a column operated in flow-through mode; wherein the one or more anion exchange chromatography columns is charged and equilibrated with a solution comprising 20 mM Tris, 2 M sodium chloride and 0.001% w/v poloxamer 188, then a solution of 40 mM Tris, 170 mM sodium chloride and 0.001% w/v poloxamer 188; loaded with a 1.0×10¹³-5.0×10¹³ vg/mL-r load challenge at 18-25° C.; and flushed and eluted with a solution comprising 40 mM Tris, 170 mM sodium chloride and 0.001% w/v poloxamer 188, yielding an anion exchange chromatography pool; wherein the anion exchange chromatography pool is filtered through an about 0.2 μm filter, yielding a filtered anion exchange chromatography pool;
(i) processing the filtered anion exchange chromatography pool of(h) through a tangential flow filtration (TFF) filter yielding a TFF load pool; wherein the TFF filter is equilibrated with buffer comprising 40 mM Tris, 170 mM sodium chloride, and 0.001% (w/v) poloxamer 188; wherein the TFF load pool is concentrated by ultrafiltration to a viral concentration of about 5.0×10¹² vg/mL, followed by diafiltration comprising buffer exchange with a buffer comprising 10 mM sodium phosphate, 180 mM sodium chloride, and 0.001% (w/v) poloxamer 188 (buffer pH of 7.1-7.5, e.g., pH 7.3), followed by filtration through an about 0.2 μm filter, yielding a filtered TFF load pool;
wherein a TFF recovery flush pool is prepared by subjecting the TFF filter to a recovery flush using a buffer comprising 10 mM sodium phosphate, 180 mM sodium chloride, and 0.001% (w/v) poloxamer 188 (buffer pH of 7.1-7.5, e.g., pH 7.3); wherein the TFF recovery flush pool is filtered through an about 0.2 μm filter, yielding a filtered TFF recovery flush pool;
wherein the filtered TFF load pool and filtered TFF recovery flush pool are combined to form a concentrated, buffer-exchanged pool, and optionally diluted using a buffer comprising 10 mM sodium phosphate, 180 mM sodium chloride, and 0.001% (w/v) poloxamer 188 (buffer pH of 7.1-7.5, e.g., pH 7.3), wherein the concentrated, buffer-exchanged pool comprises a viral concentration of 2.0×10¹²-6.0×10¹² vg/mL;
(j) processing the concentrated, buffer-exchanged pool of (i) through a viral retentive filtration (VRF) filter to yield a viral filtration pool; wherein the VRF filter comprises a pore size of about 35 nm and is flushed twice before use with a solution comprising 10 mM sodium phosphate, 180 mM sodium chloride, and 0.001% poloxamer 188 (solution pH of 7.1-7.5, e.g., pH 7.3); and wherein the viral filtration pool is filtered through a filter of about 0.2 μm, yielding a filtered viral filtration pool comprising a viral concentration of 3.5×10¹²-5.0×10¹² vg/mL; and
(k) processing the viral production pool of (j) through an about 0.22 μm filter, e.g., filtering twice through an about 0.22 μm filter;
wherein the method yields a purified rAAV2 composition comprising AAV2 capsid protein and a polynucleotide encoding AADC (e.g., SEQ ID NO: 979) or a functional variant thereof, wherein the composition comprises a viral concentration of 3.0×10¹²-5.0×10¹² vg/mL in a solution comprising 10 mM sodium phosphate, 180 mM sodium chloride, and 0.001% poloxamer 188 (solution pH of 7.1-7.5, e.g., pH 7.3).

100. The method of claim 99, wherein the viral expression construct comprises SEQ ID NO: 1778.

101. The method of claim 99 or 100, wherein the viral expression construct encodes for an AAV2 VP1 polypeptide comprising the amino acid sequence of SEQ ID NO: 16.

102. The method of any one of claims 99-101, wherein the viral concentration of the purified rAAV2 composition is about 5.0×10¹² vg/mL.

103. The method of any one of claims 99-102, wherein the method produces a total process rAAV yield of 30%-50%.

104. The method of any one of claims 99-103, wherein the purified rAAV2 composition comprises greater than about 60% full viral capsids (e.g., capsids comprising the polynucleotide encoding AADC), less than about 5% protein contaminants from the VPCs, less than 2 ng/mL Sf9 residual host DNA contaminants, an osmolality of 300-400 mOsm/kg, less than about 6000 particles with a size of ≥10 μm, less than about 600 particles with a size of ≥25 μm, and/or a solution pH of 7.3±0.5

105. The method of any one of claims 99-104, wherein the viral expression construct comprises one or more polynucleotides encoding an AAV2 VP1 capsid protein, an AAV2 VP2 capsid protein, an AAV2 VP3 capsid protein, an AAV2 Rep52 protein, and/or an AAV2 Rep78 protein.

106. The method of claim 105, wherein the AAV2 VP1 capsid protein, AAV2 VP2 capsid protein, and AAV2 VP3 capsid protein are encoded in one or more open reading frames and the AAV2 Rep52 and AAV2 Rep78 are encoded in one or more open reading frames, wherein the one or more open reading frames encoding the AAV2 VP1 capsid protein, AAV2 VP2 capsid protein, and AAV2 VP3 capsid protein and the one or more open reading frames encoding the AAV2 Rep52 and AAV2 Rep78 are different open reading frames.

107. The method of claim 106, wherein AAV2 VP1 capsid protein, AAV2 VP2 capsid protein, and AAV2 VP3 capsid protein are encoded in a first open reading frame and the AAV2 Rep52 and AAV2 Rep78 are encoded in a second open reading frame.

108. The method of any one of claims 99-107, wherein the method further comprises aliquoting the purified rAAV2 composition into one or more vials at a volume of about 1.2 mL, wherein the one or more vials have an extractable volume of about 1.0 mL.

109. The method of claim 108, wherein the method further comprises storing the one or more vials at ≤65° C.

110. A composition comprising a polynucleotide encoding AADC (e.g., SEQ ID NO: 979) or a functional variant thereof, wherein the composition comprises 3.0×10¹²-5.0×10¹² vg/mL rAAV2s, e.g., about 5.0×10¹² vg/mL rAAV2s, in a solution comprising 10 mM sodium phosphate, 180 mM sodium chloride, and 0.001% poloxamer 188 (solution pH of 7.1-7.5, e.g., pH 7.3).

111. The composition of claim 110, wherein the composition is produced by the method of any one of claims 99-109.

112. The composition of claim 110 or claim 111, wherein the composition comprises greater than about 60% full viral capsids (e.g., less than about 40% empty viral capsids), less than about 5% protein contaminants, less than 2 ng/mL Sf9 residual host DNA contaminants, an osmolality of 300-400 mOsm/kg, less than about 6000 particles with a size of ≥10 μm, less than about 600 particles with a size of ≥25 μm, and/or a solution pH of 7.3±0.5.

113. The composition of any one of claims 110-112, wherein the composition comprises less than 20% empty viral capsids.

114. The composition of claim 113, wherein the composition comprises less than 10% empty viral capsids.

115. The composition of any one of claims 110-114, wherein the composition has an AADC relative potency of at least 50%.

116. The composition of any one of claims 110-115, wherein the rAAV2s comprise an AAV2 capsid protein comprising SEQ ID NO: 1778, e.g., encoding SEQ ID NO: 16.

117. The composition of any one of claims 110-116, for use in treating and/or preventing Parkinson's Disease.

118. A method of treating Parkinson's Disease comprising administering an effective amount of the composition of any one of claims 110-116.

119. Use of the composition of any one of claims 110-116 in the manufacture of a medicament for treating and/or preventing Parkinson's Disease.

120. A nucleic acid sequence encoding an AAV2 capsid protein, wherein the sequence comprises SEQ ID NO: 1778.

121. The nucleic acid sequence of claim 120, wherein the AAV2 capsid protein comprises the amino acid sequence of SEQ ID NO: 16.
